(19) United States
(12) Patent Application Publication
(10) Pub. No.: US 2007/0003926 A1
(43) Pub. Date: Jan. 4, 2007

(54) Nucleic acid sequences from drosophila melanogaster that encode proteins essential for viability and uses thereof

(76) Inventors: Lynn Stam, Raleigh, NC (US); Kim Kamdar, LaJolla, CA (US); Eric Spana, Raleigh, NC (US); Jane Bachmann, Basel (CH)

Correspondence Address: SYNGENTA BIOTECHNOLOGY, INC.;PATENT DEPARTMENT, 3054 CORNWALLIS ROAD, P.O. BOX 12257, RESEARCH TRIANGLE PARK, NC, 27709-2257, US

(21) Appl. No.: 10/527,571

(22) PCT Filed: Aug. 8, 2003
(86) PCT No.: PCT/US03/24982

§ 371 Date: Mar. 14, 2005

Related U.S. Application Data
(60) Provisional application No. 60/422,377, filed on Oct. 30, 2002.

(51) Int. Cl. C12Q 1/68; G01N 33/53; A01N 61/00

(52) U.S. Cl. 435/6; 435/7.1; 514/1

(57) ABSTRACT

Nucleotide sequences are isolated from Drosophila melanogaster that code for proteins essential for viability. These proteins are useful for discovering new insecticides based on the essentiality of the nucleotide sequences for Drosophila viability. Further provided are recombinant proteins and methods for identifying inhibitors to these proteins. Protein inhibitors active in the methods disclosed herein are useful as insecticidal, ectoparasiticidal, antiparasitic, anthementhic and acaracidal agents.

[0001] This application claims the benefit of U.S. Provisional Patent Application Ser. No. 60/422,377 filed Oct. 30, 2002, which is incorporated by reference in its entirety.

[0002] The Sequence Listing associated with the instant disclosure has been submitted as a 2.62 megabyte file on CD-R (in duplicate) instead of on paper. Each CD-R is marked in indelible ink to identify the Applicants, Title, File Name (70131WOPCT.ST25.txt), Creation Date (Aug. 7, 2003), Computer System (IBM-PC/MS-DOS/MS-Windows), and Docket No. (70131 WOPCT). The Sequence Listing submitted on CD-R is hereby incorporated by reference into the instant disclosure.

### FIELD OF INVENTION

[0003] The present invention pertains to nucleic acid sequences isolated from Drosophila melanogaster that encode proteins essential for viability. The invention particularly relates to methods of using these proteins as insecticide targets, based on this essentiality.

### BACKGROUND OF THE INVENTION

[0004] Insects contribute or cause many human and animal diseases, and are responsible for substantial agricultural and property damage. The societal costs associated with insect pests in dollars, time and suffering are monumental. The total worldwide market size for insecticide crop protection is over $5 billion. To combat these problems, insecticidal compounds have been developed and employed.

[0005] The idea to use chemicals for insect control is not new. The scientific use of pesticides started with the introduction of arsenical insecticides and organic compounds such as tar, petroleum oils, and dinitrophenol emulsions at the end of the last century. But, the systematic search for synthetic organic insecticides was only launched after the discovery of the insecticidal properties of DDT in 1939. After World War II, chemical research concentrated mainly on chlorinated hydrocarbons and cyclodienes, which all require high rates of application and have a rather broad spectrum of activity. Most of them are persistent in the environment and may pose a significant risk for accumulation in the food chain. Today the use of these chemicals is very much restricted.

[0006] From this point, the major emphasis in research has been given to organophosphates and carbamates, which are readily degradable in the environment with little tendency for bioaccumulation. The toxicity of these compounds varies within a broad range from medium to highly toxic. Organophosphates and carbamates are still widely use, although the more toxic ones are banned in certain countries. The formamidines have as their major advantage a different mode of action and their selectivity, which made them suitable for use in IPM (insect pest management) programs. They are easily degradable with no accumulation potential, but for toxicological reasons some have had to be withdrawn from the market.

[0007] For the past decade, insecticide research has concentrated on leadfinding for new chemical structures interfering with new target mechanisms. The chances for success are rather remote, because the hurdles for the registration of a new insecticide are set very high. Toxicological aspects, insecticide resistance, environmental behavior, and IPM fitness are some of the critical factors that have to be considered together with economical factors.

[0008] Novel insecticides can now be discovered using high-throughput screens that implement recombinant DNA technology. Proteins found to be essential to insect viability can be recombinantly produced through standard molecular biological techniques and utilized as insecticide targets in screens for novel inhibitors of the enzymes' activity. The novel inhibitors discovered through such screens may then be used as insecticides to control undesirable insect infestation.

[0009] However, as the world population continues to grow, there will be increasing food shortages. Therefore, there exists continuing need to find new, effective and economic insecticides.

### SUMMARY OF THE INVENTION

[0010] In view of these needs, it is one object of the invention to provide essential genes in insects such as Drosophila melanogaster. It is another object to provide the essential proteins encoded by these essential genes for assay development to identity inhibitory compounds with insecticidal activity. It is still another object of the present invention to provide an effective and beneficial method for identifying new or improved insecticides using the essential proteins of the invention.

[0011] In furtherance of these and other objects, the present invention provides DNA molecules comprising nucleotide sequences isolated from Drosophila melanogaster that encode proteins essential for viability. The inventors are the first to demonstrate that the nucleotide sequences of the invention are essential for viability. This knowledge is exploited to provide novel insecticide modes of action. One advantage of the present invention is that the proteins encoded by the essential nucleotide sequences provide the bases for assays designed to easily and rapidly identify novel insecticides.

[0012] Disruption of the nucleotide sequences or messenger RNA of the invention demonstrates that the activity of each corresponding encoded protein is essential for Drosophila viability. Genetic results show that when each nucleotide sequence of the invention is mutated in Drosophila or disrupted at the transcription level, the resulting phenotype is lethal. This demonstrates a critical role for the protein encoded by the mutated nucleotide sequence. This further implies that chemicals that inhibit the expression of the protein when in contact with insects are likely to have detrimental effects on insects and are potentially good insecticide candidates. The present invention therefore provides methods of using the disclosed nucleotide sequences or proteins encoded thereby to identify inhibitors thereof. The inhibitors can then be used as insecticides to kill undesirable insect populations where crops are grown, particularly agronomically important crops such as maize, and other cereal crops such as wheat, oats, rye, sorgum, rice, barley, millet, turf and forage grasses and the like, as well as cotton, sugar cane, sugar beet, oilseed rape, soybeans, vegetable crops and fruits.

[0013] The present invention accordingly provides cDNA sequences derived from Drosophila melanogaster. In one embodiment, the present invention provides an isolated DNA molecule comprising a nucleotide sequence selected from the group consisting of the even numbered SEQ ID NOs:14-380. In another embodiment, the present invention provides an isolated DNA molecule comprising a nucleotide sequence that encodes a protein selected from the group consisting of the odd numbered SEQ ID NOs:15-381.

[0014] The present invention also provides a chimeric construct comprising a promoter operatively linked to a DNA molecule according to the present invention, wherein the promoter is preferably functional in a eukaryote, wherein the promoter is preferably heterologous to the DNA molecule. The present invention further provides a recombinant vector comprising a chimeric construct according to the present invention, wherein said vector is capable of being stably transformed into a host cell. The present invention still further provides a host cell comprising a DNA molecule according to the present invention, wherein said DNA molecule is preferably expressible in the cell. The host cell is preferably selected from the group consisting of an insect cell, a yeast cell, and a prokaryotic cell.

[0015] The present invention also provides proteins essential for Drosophila melanogaster viability. In one embodiment, the present invention provides an isolated protein comprising an amino acid sequence selected from the group consisting of the odd numbered SEQ ID NOs:15-361. In accordance with another embodiment, the present invention also relates to the recombinant production of proteins of the invention and methods of using the proteins of the invention in assays for identifying compounds that interact with the protein.

[0016] In another preferred embodiment, the present invention describes a method for identifying chemicals having the ability to inhibit the activity of the disclosed proteins. In a preferred embodiment, the present invention provides a method for selecting compounds that interact with a protein of the invention, comprising: (a) expressing a DNA molecule according to the present invention to generate the corresponding protein of the invention, (b) testing a compound suspected of having the ability to interact with the protein expressed in step (a), and (c) selecting compounds that interact with the protein in step (b).

[0017] Other objects and advantages of the present invention will become apparent to those skilled in the art and from a study of the following description of the invention and non-limiting examples. The entire contents of all publications mentioned herein are hereby incorporated by reference.

### BRIEF DESCRIPTION OF THE SEQUENCES IN THE SEQUENCE LISTING

[0018] SEQ ID NOs:1-13 are PCR primers.

[0019] Even numbered SEQ ID NOs:14-380 are nucleotide sequences described in the table below.

[0020] Odd numbered SEQ ID NOs:15-381 are protein sequences encoded by the immediately preceding nucleotide sequence, e.g., SEQ ID NO:15 is the protein encoded by the nucleotide sequence of SEQ ID NO:14, SEQ ID NO:17 is the protein encoded by the nucleotide sequence of SEQ ID NO:16, etc.

TABLE 1
Drosophila Sequences

| seq | Inventor's | | | | |
|---|---|---|---|---|---|
| ID | reference | function | Domains | Best blast hit | score |
| 14-15 | CT28483 | CG10260 | PI3Ka, PI3_4_KINASE_1, | (D83538) 230 kDa | 1600 |
| | | EG: BACR7C10.2 protein | PI3_4_KINASE_2, | phosphatidylinositol 4-kinase | |
| | | kinase, 1- | PI3_4_KINASE_3, | [Rattus norvegicus] | |
| | | phosphatidylinositol 4- | PI3_PI4_kinase | | |
| | | kinase | | | |
| 16-17 | CT28925 | CG10365 unknown | | hypothetical protein MGC4504 | 185 |
| | | | | [Homo sapiens] | |
| 18-19 | CT29122 | CG10370 Tbp-1 Tat- | AAA, ATP_GTP_A, | Q63569\|PRSA_RAT 26S | 720 |
| | | binding protein-1, | MITOCH_CARRIER | PROTEASE REGULATORY | |
| | | Proteasome 26S | | SUBUNIT 6A (TAT-BINDING | |
| | | regulatory subunit 6A, | | PROTEIN 1) (TBP-1) | |
| | | multicatalytic | | | |
| | | endopeptidase, | | | |
| 20-21 | CT29492 | CG10545 Gb13F G | GPROTEINB, | GBB1_CAEEL GUANINE | 619 |
| | | protein b-subunit 13F, G- | GPROTEINBRPT, WD40, | NUCLEOTIDE-BINDING | |
| | | protein coupled receptor, | WD40_REGION, | PROTEIN BETA SUBUNIT 1 | |
| | | protein signaling pathway | WD_REPEATS | | |
| 22-23 | CT30008 | CG10701 Moe Dmoesin, | BAND41, BAND_41_1, | Homo sapiens ‘moesin’ | |
| | | motor involved in | BAND_41_2, BAND_41_3, | gi: 4505257 | |
| | | cytoskeleton organization | Band_41, ERM, ERMFAMILY | | |
| | | and biogenesis | | | |
| 24-25 | CT30208 | CG10776 wit | PROTEIN_KINASE_ATP, | NP_031587.1\| (NM_007561) | 362 |
| | | Serine/threonine kinase- | PROTEIN_KINASE_DOM, | bone morphogenic protein | |
| | | D; wishful thinking, a type | TGFB_RECEPTOR, pkinase | receptor, type II | |
| | | II transforming growth | | | |
| | | factor beta receptor | | | |
| | | involved in protein | | | |
| | | phosphorylation | | | |
| 26-27 | CT30807 | CG10997 chloride | | NP_001280.2\| (NM_001289) | 119 |
| | | channel? | | chloride intracellular channel 2 | |
| | | | | [Homo sapiens] | |
| 28-29 | CT30887 | CG11033 unknown | | NP_036440.1\| (NM_012308) F- | 431 |
| | | | | box and leucine-rich repeat | |
| | | | | protein 11 | |
| 30-31 | CT31117 | CG11130 Rtc1 RNA 3′ | | Q9Y2P8\|RCL1_HUMAN RNA | 326 |
| | | terminal phosphate | | 3′-TERMINAL PHOSPHATE | |
| | | cyclase, Rtc1 | | CYCLASE-LIKE PROTEIN | |
| | | | | (HSPC338) | |
| 32-33 | CT1249 | CG1114 Weak similarity | | NP_071334.1\| (NM_022051) | 249 |
| | | with apoptosis protein RP- | | egl nine homolog 1 (C. elegans) | |
| | | 8, | | | |
| 34-35 | CT1483 | CG1119 Gnf1 Germ line | ATP_GTP_A, BRCT, | A49651 replication factor C | 661 |
| | | transcription factor 1, | BRCT_DOMAIN, NLS_BP, | large subunit - human | |
| | | DNA binding/DNA | RFC | | |
| | | replication factor | | | |
| 36-37 | CT7860 | CG11190 unknown | | BAB60854.1\| (AB057724) | 387 |
| | | | | phosphatidyl inositol glycan | |
| | | | | class T [Homo sapiens] | |
| 38-39 | CT1834 | CG1135 unknown | FHA, FHA_DOMAIN | NP_006328.1\| (NM_006337) | 383 |
| | | | | microspherule protein 1; cell | |
| | | | | cycle-regulated factor | |
| 40-41 | CT31875 | CG11418 EG: 8D8.8 | | NP_060579.1\| (NM_018109) | 252 |
| | | involved in cell cycle | | hypothetical protein FLJ10486 | |
| | | | | [Homo sapiens] | |
| 42-43 | CT36241 | CG11452 unknown | | none | |
| 44-45 | CT1993 | CG1149 MstProx | LRRNT | Homo sapiens ‘toll-like | |
| | | MstProx, transmembrane | | receptor1’ gi: 4507527 | |
| | | receptor involved in | | | |
| | | defense response | | | |
| 46-47 | CT34608 | CG11511 similarity to | ZINC_FINGER_C2H2, | AAC78286.1\| (AF032674) | 128 |
| | | broad-complex Z2- | ZINC_FINGER_C2H2_2, zf- | broad-complex Z2-isoform | |
| | | isoform | C2H2 | [Manduca sexta] | |
| 48-49 | CT5404 | CG11595 unknown | | none | |
| 50-51 | CT17728 | CG11779 receptor - | | XP_049282.1\| (XM_049282) | 436 |
| | | mitochondrial | | translocase of inner | |
| | | transporter??? | | mitochondrial membrane 44 | |
| | | | | homolog | |
| 52-53 | CT1465 | CG12007 | | NP_004572.1\| (NM_004581) | 278 |
| | | geranylgeranyltransferase, | | Rab geranylgeranyltransferase, | |
| | | alpha subunit | | alpha subunit [Homo sapiens] | |
| 54-55 | CT5438 | CG12079 NADH | complex1_30 Kd | AAD40386.1\| (AF100743) | 323 |
| | | dehydrogenase | | NADH-Ubiquinone reductase | |
| | | (ubiquinone) | | [Homo sapiens] | |
| 56-57 | CT43008 | CG12085 pUbsf DPUF68 | RBD, RNP_1, rrm | NP_525123.1\| (NM_080384) | 1037 |
| | | Puf60 polyU binding | | poly-U-binding splicing factor | |
| | | splicing factor, poly(U) | | | |
| | | binding involved in | | | |
| | | mRNA splicing | | | |
| 58-59 | CT5902 | CG12093 unknown | CRYSTALLIN_BETAGAMMA | NP_499515.1\| (NM_067114) | 137 |
| | | | | Y41C4A.8.p [Caenorhabditis | |
| | | | | elegans] | |
| 60-61 | CT6734 | CG12113 unknown | ATP_GTP_A | AAH08013 (BC008013) Similar | 498 |
| | | | | to CG12113 gene product | |
| | | | | [Homo sapiens] | |
| 62-63 | CT7760 | CG12135 c12.1 unknown | | AF110775_1 (AF110775) | 252 |
| | | | | adrenal gland protein AD-002 | |
| | | | | [Homo sapiens] | |
| 64-65 | CT9355 | CG12181 Sgs4 sgs-4 | | Mus musculus Sap62 | |
| | | salivary gland secretion | | MGI: 104912 | |
| | | protein 4, pupal glue | | | |
| | | protein | | | |
| 66-67 | CT12665 | CG12225 Spt6 spt6, | S1 | Caenorhabditis elegans | |
| | | promoter-associated | | T04A8.14 WP: CE13120 | |
| | | pausing and | | | |
| | | transcriptional elongation | | | |
| 68-69 | CT13424 | CG12238 'probable | | NP_060758.1\| (NM_018288) | 222 |
| | | transcription factor | | hypothetical protein FLJ10975 | |
| | | | | [Homo sapiens] | |
| 70-71 | CT14932 | CG12251 AQP AQP | | XP_059490.1\| (XM_059490) | 62.4 |
| | | aquaporin, water channel | | hypothetical protein XP_059490 | |
| | | | | [Homo sapiens] | |
| 72-73 | CT23511 | CG12348 Sh open | | | |
| | | rectifying potassium | | | |
| | | channel, shaker | | | |
| 74-75 | CT32757 | CG12482 unknown | | NP_076113.1\| (NM_023624) | 40.8 |
| | | | | lecithin-retinol acyltransferase | |
| | | | | [Mus musculus] | |
| 76-77 | CT33237 | CG12497 | LDLRA_1, LDLRA_2, | CAC86027.1\| (AJ313389) tsetse | 90.9 |
| | | EG: BACR25B3.2 low- | LDLRECEPTOR, NLS_BP, | EP protein [Glossina morsitans | |
| | | density lipoprotein | PRO_RICH, ldl_recept_a | morsitans] | |
| | | receptor-like | | | |
| 78-79 | CT33996 | CG12537 unknown | | AAK31375.1\|AC084329_1 | 116 |
| | | | | (AC084329) ppg3 [Leishmania | |
| | | | | major] | |
| 80-81 | CT34671 | CG12600 unknown | WW_rsp5_WWP | AF213258_1 (AF213258) | 56.2 |
| | | | | membrane-associated guanylate | |
| | | | | kinase-related MAGI-3 [Mus | |
| | | | | musculus] | |
| 82-83 | CT2591 | CG1265 unknown | | XP_059471.1\| (XM_059471) | 67.8 |
| | | | | similar to MANNOSE-P- | |
| | | | | DOLICHOL UTILIZATION | |
| | | | | DEFECT 1 | |
| 84-85 | CT35764 | CG12701 unknown | NLS_BP, PRO_RICH, | NM_078717) kismet | 117 |
| | | | ZINC_FINGER_C2H2, | [Drosophila melanogaster] | |
| | | | ZINC_FINGER_C2H2_2, zf- | | |
| | | | C2H2 | | |
| 86-87 | CT28931 | CG12750 nucampholin, | RNA binding | (AB046824) KIAA1604 protein | 833 |
| | | transcription factor? | | [Homo sapiens] | |
| 88-89 | CT32253 | CG13034 unknown | | (AC084329) ppg3 [Leishmania | 94.4 |
| | | | | major] | |
| 90-91 | CT32701 | CG13372 EG: 171D11.6 | | none | |
| | | unknown | | | |
| 92-93 | CT40992 | CG13372 EG: 171D11.6 | | none | |
| | | unknown | | | |
| 94-95 | CT32721 | CG13380 unknown | | NP_499428.1\| (NM_067027) | 43.5 |
| | | | | W09D6.5.p [Caenorhabditis | |
| | | | | elegans] | |
| 96-97 | CT33014 | CG13620 unknown | CYTOCHROME_C, NLS_BP, | Caenorhabditis elegans ‘similar | |
| | | | ZINC_FINGER_C2H2, | to Zinc finger, C2H2 type | |
| | | | ZINC_FINGER_C2H2_2, zf- | | |
| | | | C2H2 | | |
| 98-99 | CT33019 | CG13625 histone | NLS_BP | NP_498982.1\| (NM_066581) | 265 |
| | | protein? | | R08D7.1.p [Caenorhabditis | |
| | | | | elegans] | |
| 100-101 | CT33241 | CG13760 | Cysteine proteinases | (AK054681) unnamed protein | 144 |
| | | EG: BACR25B3.6 | | product [Homo sapiens] | |
| | | unknown | | | |
| 102-103 | CT33317 | CG13818 unknown | ATP_GTP_A | T26047 hypothetical protein | 39.3 |
| | | | | W01C8.5 - Caenorhabditis | |
| | | | | elegans | |
| 104-105 | CT3228 | CG1405 cg1405 ATP | HELICASE, helicase_C | XP_008088.1\| (XM_008088) | 825 |
| | | dependent helicase | | pre-mRNA splicing factor Prp16 | |
| | | | | [Homo sapiens] | |
| 106-107 | CT33819 | CG14206 structural | | AF400207_1 (AF400207) | 225 |
| | | protein of ribosome | | ribosomal protein S10 | |
| | | | | [Spodoptera frugiperda] | |
| 108-109 | CT3352 | CG1422 p115 vesicular | | P41541\|VDP_BOVIN General | 725 |
| | | transporter, membrane | | vesicular transport factor p115 | |
| | | docking | | | |
| 110-111 | CT33841 | CG14226 CT33841 | fn3 | NP_075214.1\| (NM_022925) | 93.6 |
| | | protein tyrosine | | protein tyrosine phosphatase, | |
| | | phosphatase | | receptor type, Q [Rattus | |
| 112-113 | CT34063 | CG14411 protein | CRYSTALLIN_BETAGAMMA | AAK26171.1\| (AY028703) | 211 |
| | | phosphatase | | phosphatidylinositol-3 phosphate | |
| | | | | 3-phosphatase adaptor | |
| 114-115 | CT3509 | CG1448 inx3 innexin 3 | | Q9XYN1\|INX2_SCHAM | 332 |
| | | | | Innexin Inx2 (Innexin-2) (G- | |
| | | | | Inx2) | |
| 116-117 | CT34434 | CG14656 unknown | | NP_542443.1\| (NM_080712) | 122 |
| | | | | tty-P1 [Drosophila | |
| | | | | melanogaster] | |
| 118-119 | CT34588 | CG14778 integral | | (AE003604) CG2022 gene | 179 |
| | | peroxisomal membrane | | product [Drosophila | |
| | | | | melanogaster] | |
| 120-121 | CT43287 | CG14779 EG: 80H7.2 | Tubulin-beta mRNA | none | |
| | | tubulin-beta mRNA | autoregulation signal domain | | |
| | | autoregulation signal | | | |
| | | protein | | | |
| 122-123 | CT34589 | CG14779 EG: 80H7.2 | Tubulin-beta mRNA | none | |
| | | tubulin-beta mRNA | autoregulation signal domain | | |
| | | autoregulation signal | | | |
| | | protein | | | |
| 124-125 | CT34599 | CG14789 | AA_TRNA_LIGASE_I | AF455270_1 (AF455270) | 261 |
| | | EG: BACN32G11.6 | | C21ORF80 [Mus musculus] | |
| | | Aminoacyl-transfer RNA | | | |
| | | synthetases class-I | | | |
| | | signature protein | | | |
| 126-127 | CT34602 | CG14792 sta Laminin- | RIBOSOMALS2, | (AB032438) stubarista | 410 |
| | | receptor Stubarista, | RIBOSOMAL_S2_1, | [Drosophila erecta] | |
| | | protein biosynthesis Rp40 | RIBOSOMAL_S2_2, | | |
| | | | Ribosomal_S2 | | |
| 128-129 | CT34626 | CG14813 delta; COP | ATP_GTP_A: ATP/GTP- | NP_001646.2\| (NM_001655) | 585 |
| | | coatomer complex COPI | binding site motif A (P-loop) | archain; coatomer protein delta- | |
| | | delta-COP subunit delta | protein | COP [Homo sapiens] | |
| 130-131 | CT34665 | CG14849 unknown | | none | |
| 132-133 | CT3729 | CG1489 Pros45 sug1, | AAA, ATP_GTP_A | P54814\|PRS8_MANSE 26S | 727 |
| | | multicatalytic | | PROTEASE REGULATORY | |
| | | endopeptidase regulator, | | SUBUNIT 8 (18-56 PROTEIN) | |
| | | multicatalytic | | | |
| | | endopeptidase,, | | | |
| | | proteasome ATPase, | | | |
| | | preoteolysis and | | | |
| | | pepitolysis | | | |
| 134-135 | CT34842 | CG14991 unknown | BAND_41_3, PH_DOMAIN | XP_051693.1\| (XM_051693) | 635 |
| | | | | mitogen inducible 2 [Homo | |
| | | | | sapiens] | |
| 136-137 | CT34979 | CG15104 topoisomerase | | NP_055023.1\| (NM_014208) | 102 |
| | | I-binding RS protein’ | | dentin sialophosphoprotein; | |
| | | | | dentin phosphophoryn; | |
| 138-139 | CT3955 | CG1530 unknown | PRO_RICH | XP_092523.1\| (XM_092523) | 230 |
| | | | | hypothetical protein XP_092523 | |
| | | | | [Homo sapiens] | |
| 140-141 | CT35308 | CG15321 unknown | | none | |
| 142-143 | CT35676 | CG15560 putative cell | | NP_499205.1\| (NM_066804) | 170 |
| | | membrane-associated | | Transmembrane and sushi | |
| | | mucin | | domain [Caenorhabditis elegans] | |
| 144-145 | CT30180 | CG15811 Rop rop, ‘Ras | Sec1 | NP_037170.1\| (NM_013038) | 756 |
| | | opposite | | syntaxin binding protein 1 | |
| | | | | [Rattus norvegicus] | |
| 146-147 | CT34113 | CG15896 unknown | | NP_055487.1\| (NM_014672) | 182 |
| | | | | KIAA0391 gene product [Homo | |
| | | | | sapiens] | |
| 148-149 | CT34115 | CG15898 unknown | | NP_078828.1\| (NM_024552) | 47.8 |
| | | | | hypothetical protein FLJ12089 | |
| | | | | [Homo sapiens] | |
| 150-151 | CT4708 | CG1683 Ant2 Ant2, | ADPTRNSLCASE, | (AF218587) ADP/ATP | 485 |
| | | ADP/ATP translocase. | MITOCARRIER, | translocase [Lucilia cuprina] | |
| | | Adenine nucleotide | MITOCH_CARRIER, mito_carr | | |
| | | translocase 2, ATP/ADP | | | |
| | | antiporter | | | |
| 152-153 | CT37506 | CG16903 EG: 67A9.2 | | NP_446114.1\| (NM_053662) | 411 |
| | | non-specific RNA | | cyclin L [Rattus norvegicus] | |
| | | polymerase II | | | |
| | | transcription factor | | | |
| 154-155 | CT35131 | CG16916 Rpt3 p48A, 26S | AAA, CLPPROTEASEA | PRS6_MANSE 26S | 681 |
| | | proteasome regulatory | | PROTEASE REGULATORY | |
| | | complex subunit p48A | | SUBUNIT 6B (ATPASE MS73) | |
| 156-157 | CT4802 | CG1696 unknown | | NP_056158.1\| (NM_015343) | 341 |
| | | | | hypothetical protein [Homo | |
| | | | | sapiens] | |
| 158-159 | CT43084 | CG1697 rho-4 rho-4 Rho- | | Rattus norvegicus ‘rhomboid- | |
| | | related [10C6] rhomboid-4 | | related protein’ | |
| | | | | EMBL: Y17258 | |
| 160-161 | CT4810 | CG1698 unknown | | none | |
| 162-163 | CT4826 | CG1703 ATP-binding | ABC_TRANSPORTER, | (AF293383) ABC50 [Rattus | 802 |
| | | cassette (ABC) transporter | ABC_tran, ATP_GTP_A, | norvegicus] | |
| | | | ATP_GTP_A2, DA_BOX, | | |
| | | | NLS_BP | | |
| 164-165 | CT35402 | CG17252 BCL7-like | | (NM_001707) B-cell | 94.4 |
| | | BCL7-like | | CLL/lymphoma 7B [Homo | |
| | | | | sapiens] | |
| 166-167 | CT21145 | CG17309 CSK CSK, | PROTEIN_KINASE_ATP, | AAH18394 (BC018394) c-src | 462 |
| | | involved in protein | PROTEIN_KINASE_DOM, | tyrosine kinase [Mus musculus] | |
| | | phosphorylation | PROTEIN_KINASE_TYR, | | |
| | | | SH2, SH2DOMAIN, | | |
| | | | TYRKINASE, pkinase | | |
| 168-169 | CT5050 | CG1740 Ntf-2 NTF-2, | NTF2_DOMAIN | (NM_059921) nuclear transport | 127 |
| | | protein carrier involved in | | factor 2 like [Caenorhabditis | |
| | | protein-nucleus import | | | |
| 170-171 | CT5086 | CG1746 anon- | ATP-synt_C, ATPASEC, | Q9U505\|ATPC_MANSE ATP | 177 |
| | | EST: Posey224 hydrogen- | ATPASE_C | synthase subunit C, | |
| | | transporting ATP | | mitochondrial precursor (Lipid- | |
| | | synthase/enzyme, | | binding | |
| | | hydrogen-transporting | | | |
| | | two-sector ATPase | | | |
| 172-173 | CT34491 | CG17734 unknown | | NP_062788.1\| (NM_019814) | 82.4 |
| | | | | hypoxia induced gene 1 [Mus | |
| | | | | musculus] | |
| 174-175 | CT39345 | CG17766 EG: 86E4.3 | WD40, WD40_REGION | AF188123_1 (AF188123) TGF- | 1160 |
| | | heterotrimeric G-protein | | beta resistance-associated | |
| | | GTPase | | protein TRAG [Mus musculus] | |
| 176-177 | CT39414 | CG17791 sqd | RBD, rrm; Eukaryotic putative | Homo sapiens ‘heterogeneous | |
| | | heterogeneous-nuclear- | RNA-binding region RNP-1 | nuclear ribonucleoprotein D’ | |
| | | ribonucleoprotein-87Fb | signature, RRM-motif protein, | EMBL: AF026126 | |
| | | RNA-binding protein 3, | RRM-motif protein | | |
| | | Squid | | | |
| 178-179 | CT39758 | CG17871 Or71a tracheal | | none | |
| | | gasfilling mutant1b, | | | |
| | | Or71a, odorant receptor | | | |
| 180-181 | CT40282 | CG18009 Trf2 TATA box | | (AB024489) TBP-like protein | 210 |
| | | binding protein-related | | [Gallus gallus] | |
| | | factor 2 | | | |
| 182-183 | CT5456 | CG1826 product | BTB, NLS_BP, | (AB067467) KIAA1880 protein | 595 |
| | | involved in developmental | PROTEIN_SPLICING | [Homo sapiens] | |
| | | processes | | | |
| 184-185 | CT41472 | CG18282 Ubiquitin-like | | I45964 polyubiquitin - bovine | 431 |
| | | | | (fragment) | |
| 186-187 | CT42468 | CG18578 Ugt86Da UDP- | | none | |
| | | glucuronosyltransferase | | | |
| 188-189 | CT13908 | CG18734 Fur2 furin | | T43251 furin (EC 3.4.21.75) - | 1753 |
| | | | | fall armyworm | |
| 190-191 | CT5890 | CG1908 unknown | NLS_BP | none | |
| 192-193 | CT5932 | CG1915 sls sallimus, | AA_TRNA_LIGASE_II_1, | Gallus gallus ‘connectin/titin’ | |
| | | myosin light chain kinase | ATP_GTP_A, NLS_BP, SH3, | EMBL: D83390 | |
| | | | fn3, ig | | |
| 194-195 | CT6007 | CG1937 involved in cell | | (AF317634) HRD1 [Homo | 545 |
| | | growth and maintenance | | sapiens] | |
| 196-197 | CT5951 | CG1938 Dlic2 Dlic2, | ATP_GTP_A | (AF317841) cytoplasmic dynein | 399 |
| | | motor which is a | | light-intermediate chain 1 | |
| | | component of the | | [Xenopus | |
| | | microtubule associated | | | |
| | | protein | | | |
| 198-199 | CT6352 | CG1994 similar to | ATP_GTP_A | (AB051496) KIAA1709 protein | 1013 |
| | | Achlya ambisexualis | | [Homo sapiens] | |
| | | antheridiol steroid | | | |
| | | receptor | | | |
| 200-201 | CT6373 | CG2003 high affinity | transporter | Homo sapiens ‘Na/PO4 | |
| | | inorganic | | cotransporter’ gi: 4885441 | |
| | | phosphate:sodium | | | |
| | | symporter | | | |
| 202-203 | CT4336 | CG2151 Trxr-1 NOT | FADPNR, HGRDTASE, | (U88187) glutathione reductase | 753 |
| | | glutathione reductase | NAD_BINDING, | family member [Musca | |
| | | (NADPH) (EC: 1.6.4.2) | PNDRDTASEI, | domestica] | |
| | | involved in thioredoxin | PYRIDINE_REDOX_1, | | |
| | | reduction | pyr_redox | | |
| 203-205 | CT6738 | CG2165 BEST: CK01140 | | (NM_053311) ATPase, Ca++ | 1262 |
| | | calcium-transporting | | transporting, plasma membrane | |
| | | ATPase-like | | 1 [Rattus | |
| 206-207 | CT5965 | CG2184 Mlc2 muscle- | EF_HAND, EF_HAND_2, | MLR5_FELCA Superfast | 130 |
| | | specific myosin regulatory | efhand | myosin regulatory light chain 2 | |
| | | light chain Mlc2, involved | | (MYLC2) | |
| | | in cell motility | | | |
| 208-209 | CT7322 | CG2222 unknown | | none | |
| 210-211 | CT7705 | CG2309 ERK7 protein | | YPC2_CAEEL Putative | 392 |
| | | kinase, protein | | serine/threonine-protein kinase | |
| | | serine/threonine kinase | | C05D10.2 in chromosome III | |
| 212-213 | CT8341 | CG2520 lap lap, | ENTH | (AF182339) clathrin assembly | 502 |
| | | chaperone | | protein AP180 [Loligo pealei] | |
| 214-215 | CT9021 | CG2666 CS-1 CS-1, | | (AF221067) chitin synthase 1 | 2770 |
| | | enzyme/chitin synthase | | [Lucilia cuprina] | |
| 216-217 | CT9593 | CG2829 | NLS_BP, PFKB_KINASES_1, | (AB004884) PKU-alpha [Homo | 520 |
| | | BcDNA: GH07910 protein | PROTEIN_KINASE_ATP, | sapiens] | |
| | | kinase, protein | PROTEIN_KINASE_DOM, | | |
| | | serine/threonine kinase | PROTEIN_KINASE_ST, | | |
| | | | PRO_RICH, pkinase | | |
| 218-219 | CT9754 | CG2849 Rala Ral, RAS | ATP_GTP_A, PRENYLATION, | (XM_035787) similar to Ras- | 304 |
| | | small monomeric GTPase, | RASTRNSFRMNG, ras | related protein RAL-A [Homo | |
| | | regulates developmental | | sapiens] | |
| | | cell shape changes | | | |
| | | through the JNK pathway | | | |
| 220-221 | CT9660 | CG2829 | NLS_BP, PFKB_KINASES_1, | (AB004884) PKU-alpha [Homo | 520 |
| | | BcDNA: GH07910 protein | PROTEIN_KINASE_ATP, | sapiens] | |
| | | kinase, protein | PROTEIN_KINASE_DOM, | | |
| | | serine/threonine kinase | PROTEIN_KINASE_ST, | | |
| | | | PRO_RICH, pkinase | | |
| 222-223 | CT6171 | CG2968 hydrogen- | | P35434\|ATPD_RAT ATP | 142 |
| | | transporting ATP | | synthase delta chain, | |
| | | synthase, coupling factor | | mitochondrial precursor | |
| | | CF(0), delta-chain | | | |
| 224-225 | CT10206 | CG3034 EG: BACR7A4.6 | | (Y15172) surfeit protein 5 | 183 |
| | | similar to Surf5b [Homo | | [Takifugu rubripes] | |
| | | sapiens | | | |
| 226-227 | CT41361 | CG3071 EG: 25E8.3 | Trp-Asp (WD) repeats signature | T40471 probable Trp-Asp repeat | 273 |
| | | involved in retrograde | protein | protein - fission yeast | |
| | | (Golgi to ER) transport | | | |
| | | which is putatively a | | | |
| | | component of the | | | |
| | | coatomer | | | |
| 228-229 | CT9947 | CG3071 EG: 25E8.3 | Trp-Asp (WD) repeats signature | T40471 probable Trp-Asp repeat | 273 |
| | | involved in retrograde | protein | protein - fission yeast | |
| | | (Golgi to ER) transport | | | |
| | | which is putatively a | | | |
| | | component of the | | | |
| | | coatomer | | | |
| 230-231 | CT10723 | CG3201 Mlc-c Mlc-c, | EF_HAND, EF_HAND_2, | Homo sapiens ‘MYOSIN | |
| | | alkali light chain of non- | efhand | LIGHT CHAIN ALKALI, | |
| | | muscle myosin-II, | | SMOOTH-MUSCLE | |
| | | cytoskeleton organization | | ISOFORM (MLC3SM) | |
| | | and biogenesis | | (LC17B) (LC’ SWP: P24572 | |
| 232-233 | CT11063 | CG3313 transcription | NLS_BP, WD40, | (AB067479) KIAA1892 protein | 293 |
| | | factor | WD40_REGION | [Homo sapiens] | |
| 234-235 | CT11487 | CG3415 estradiol 17 | ADH_SHORT, GDHRDH, | (NM_000414) hydroxysteroid | 613 |
| | | beta-dehydrogenase | THIOL_PROTEASE_HIS, | (17-beta) dehydrogenase 4 | |
| | | | adh_short | [Homo sapiens] | |
| 236-237 | CT11597 | CG3446 unknown | | (AJ316011) mitochondrial | 78.6 |
| | | | | NADH: ubiquinone | |
| | | | | oxidoreductase B16.6 | |
| 238-239 | CT11623 | CG3455 Rpt4 Rpt4, | | Manduca sex ‘26S proteasome | |
| | | endopeptidase, | | regulatory ATPase subunit 10b | |
| | | multicatalytic | | (S10b)’ EMBL: AJ223384 | |
| | | endopeptidase regulator, | | | |
| | | multicatalytic | | | |
| | | endopeptidase, | | | |
| | | proteasome ATPase | | | |
| 240-241 | CT11966 | CG3560 anon- | | 1BCC\|F Chain F, Cytochrome | 150 |
| | | EST: Posey167 NADH | | Bc1 Complex From Chicken | |
| | | dehydrogenase | | | |
| 242-243 | CT12417 | CG3703 | | (NM_075735) T19D7.4.p | 251 |
| | | EG: BACR7A4.15 | | [Caenorhabditis elegans] | |
| | | cytoskeleton organization | | | |
| | | and biogenesis | | | |
| 244-245 | CT12443 | CG3715 Shc dShc, SHC- | | S25776 transforming protein | 267 |
| | | adaptor protein, protein | | (SHC) - human | |
| | | kinase putatively involved | | | |
| | | in cell growth and | | | |
| | | maintenance | | | |
| 246-247 | CT12517 | CG3747 Eaat1 Eaat1, | plasma membrane | (AF330257) glutamate | 402 |
| | | glutamate transporter, | | transporter [Mus musculus] | |
| | | Excitatory amino acid | | | |
| | | transporter 1 | | | |
| 248-249 | CT12871 | CG3861 citrate (SI)- | CITRATE_SYNTHASE, | P00889\|CISY_PIG CITRATE | 674 |
| | | synthase | CITRTSNTHASE, citrate_synt | SYNTHASE, | |
| | | | | MITOCHONDRIAL | |
| | | | | PRECURSOR | |
| 250-251 | CT12909 | CG3874 nucleotide-sugar | | (NM_015139) UDP-glucuronic | 361 |
| | | transporter-like | | acid/UDP-N- | |
| | | | | acetylgalactosamine dual | |
| 252-253 | CT13223 | CG3981 Unc-76 Dunc- | | (NM_005102) zygin 2; | 197 |
| | | 76, signal transducer | | fasciculation and elongation | |
| | | involved in axon cargo | | protein zeta 2; | |
| | | transport | | | |
| 254-255 | CT4722 | CG4013 Smr Smrter | ANTIFREEZEI, myb_DNA- | NCR2_MOUSE NUCLEAR | 275 |
| | | SMRT-related ecdysone | binding | RECEPTOR CO-REPRESSOR | |
| | | receptor-interacting factor | | 2 (N-COR2) (SILENCING | |
| | | SANT domain protein, | | MEDIATOR OF | |
| | | transcription corepressor | | | |
| 256-257 | CT13458 | CG4094 fumarate | DCRYSTALLIN, | (NM_017005) fumarate | 512 |
| | | hydratase, enzyme | FUMARATE_LYASES, | hydratase [Rattus norvegicus] | |
| | | involved in main | FUMRATELYASE, lyase_1 | | |
| | | pathways of carbohydrate | | | |
| | | metabolism | | | |
| 258-259 | CT13690 | CG4129 | | (XM_043094) KIAA0061 | 325 |
| | | BcDNA: LD21623 | | protein [Homo sapiens] | |
| | | unknown | | | |
| 260-261 | CT5938 | CG4147 Hsc70-3 Hsc70- | ER_TARGET, | (AB016836) heat shock 70 kD | 1159 |
| | | 3, Heat shock protein | HEATSHOCK70, HSP70, | protein cognate [Bombyx mori] | |
| | | cognate 3, involved in | HSP70_1, HSP70_2, HSP70_3 | | |
| | | stress response | | | |
| 262-263 | CT13852 | CG4202 Sas10 Sas10 | | (NM_023054) disrupter of | 259 |
| | | | | silencing SAS10 [Mus | |
| | | | | musculus] | |
| 264-265 | CT14019 | CG4300 spermidine | SAM_BIND | (AJ009865) spermine synthase | 276 |
| | | synthase | | [Takifugu rubripes] | |
| 266-267 | CT14119 | CG4300 spermidine | SAM_BIND | (AJ009865) spermine synthase | 276 |
| | | synthase | | [Takifugu rubripes] | |
| 268-269 | CT13914 | CG4317 Mipp2 Mipp2, | CYTOCHROME_B_QO | Mus musculus ‘multiple inositol | |
| | | multiple inositol- | | polyphosphate phosphatase’ | |
| | | polyphosphate | | EMBL: AF046908 | |
| | | phosphatase 2 | | | |
| 270-271 | CT14464 | CG4453 transporter, an | ZF_RANBP, zf-RanBP | 14578 nucleoporin Nup153 | 300 |
| | | endopeptidase involved in | | homolog - African clawed frog | |
| | | behavior which is a | | (fragment) | |
| | | component of the nucleus | | | |
| 272-273 | CT14586 | CG4481 Glu-RIB ion | ANF_receptor, | Mus musculus ‘glutamate | |
| | | channel-alpha-amino-3- | CHANNEL_PORE_K, | receptor channel a3 subunit’ | |
| | | hydroxy-5-methyl-4- | NLS_BP, SBP_GLUR, lig_chan | EMBL: AB022342 | |
| | | isoxazole propionate | | | |
| | | selective glutamate | | | |
| | | receptor; ionotropic | | | |
| | | glutamate receptor | | | |
| 274-275 | CT14874 | CG4590 inx2 inx2, | Innexin | Schistocerca americana | |
| | | neurotransmitter | | ‘innexin-2’ EMBL: 115854_1 | |
| | | transporter, Dm-inx pas | | | |
| | | related protein 33 | | | |
| 276-277 | CT15952 | CG4974 dally NOT cell | Glypican | (NM_004466) glypican 5 | 186 |
| | | adhesion molecule; | | [Homo sapiens] | |
| | | heparin sulfate | | | |
| | | proteoglycan; Dally | | | |
| 278-279 | CT16489 | CG5147 unknown | | none | |
| 280-281 | CT16663 | CG5208 | | none | |
| | | BcDNA: LD27979 | | | |
| | | unknown | | | |
| 282-283 | CT17394 | CG5485 high affinity | | (AF349043) sulfate anion | 340 |
| | | sulfate permease, sulfate | | transporter-1 [Mus musculus] | |
| | | transporter | | | |
| 284-285 | CT17382 | CG5486 Ubp64E | | (NM_063285) ubiquitin | 358 |
| | | Ubiquitin-specific | | carboxyl-terminal hydrolase | |
| | | protease 64E | | [Caenorhabditis | |
| 286-287 | CT17448 | CG5505 endopeptidase, | UCH-1, UCH-2, UCH_2_1, | (XM_027039) KIAA1453 | 254 |
| | | ubiquitin-specific | UCH_2_2, UCH_2_3 | protein [Homo sapiens] | |
| | | protease, involved in | | | |
| | | process of | | | |
| | | deubiquitylation | | | |
| 288-289 | CT17938 | CG5684 non-specific | | Q9UIV1\|CNO7_HUMAN | 376 |
| | | RNA polymerase II | | CCR4-NOT transcription | |
| | | transcription factor | | complex, subunit 7 (CCR4- | |
| | | | | associated factor | |
| 290-291 | CT17971 | CG5722 NPC1 dmNPC1, | 5TM_BOX, NLS_BP | (NM_000271) Niemann-Pick | 1061 |
| | | transmembrane receptor | | disease, type C1 [Homo sapiens] | |
| 292-293 | CT18192 | CG5797 cytoskeletal | PRO_RICH | (AB051482) KIAA1695 protein | 541 |
| | | binding protein | | [Homo sapiens] | |
| 294-295 | CT18619 | CG5939 Prm Para, | NLS_BP | (AF317670) paramyosin | 989 |
| | | Paramyosin, structural | | [Sarcoptes scabiei] | |
| | | protein of muscle, motor | | | |
| 296-297 | CT18969 | CG6058 Ald fructose- | ALDOLASE_CLASS_I, | Mus musculus Aldo1 | |
| | | bisphosphate aldolase, | NLS_BP, glycolytic_enzy | MGI: 87994 | |
| | | involved in process of | | | |
| | | glycolysis | | | |
| 298-299 | CT19788 | CG6335 histidine--tRNA | AA_TRNA_LIGASE_II_1, | (NM_008214) histidyl tRNA | 641 |
| | | ligase | AA_TRNA_LIGASE_II_2, | synthetase [Mus musculus] | |
| | | | WHEP-TRS, tRNA-synt_2b | | |
| 300-301 | CT19850 | CG6367 serine-type | | (AF053921) trypsin-like serine | 163 |
| | | endopeptidase | | protease [Ctenocephalides felis] | |
| 302-303 | CT19962 | CG6400 unknown | BROMODOMAIN, | Q9NSI6\|WDR9_HUMAN WD- | 916 |
| | | | BROMODOMAIN_2, | REPEAT PROTEIN 9 | |
| | | | GPROTEINBRPT, NLS_BP, | | |
| | | | WD40, WD40_REGION, | | |
| | | | WD_REPEATS, bromodomain | | |
| 304-305 | CT20122 | CG6470 unknown | ZINC_FINGER_C2H2, | none | |
| | | | ZINC_FINGER_C2H2_2, zf- | | |
| | | | C2H2 | | |
| 306-307 | CT20269 | CG6513 signal | | (NM_019561) endosulfine | 91.3 |
| | | transduction | | alpha; alpha-endosulfine [Mus | |
| | | | | musculus] | |
| 308-309 | CT21021 | CG6774 tracheal | | (NM_023037) hypothetical | 1006 |
| | | gasfilling mutant | | protein CG003 [Homo sapiens] | |
| 310-311 | CT21292 | CG6874 unknown | | none | |
| 312-313 | CT43217 | CG6928 Sulfate | Sulfate_transp | | |
| | | transporter | | | |
| 314-315 | CT21476 | CG6930 unknown | NLS_BP, | Caenorhabditis elegans ‘contains | |
| | | | ZINC_FINGER_C2H2, | strong similarity to a C2H2-type | |
| | | | ZINC_FINGER_C2H2_2, zf- | zinc finger’ EMBL: AF000194 | |
| | | | C2H2 | | |
| 316-317 | CT21525 | CG6946 RNA binding | RBD, rrm | Rattus norvegicus | |
| | | | | ‘ribonucleoprotein F’ | |
| | | | | EMBL: AB022209 | |
| 318-319 | CT21704 | CG7014 structural | RIBOSOMAL_S7, | (NM_001009) ribosomal protein | 347 |
| | | protein of ribosome, | Ribosomal_S7 | S5; 40S ribosomal protein S5 | |
| | | Process protein | | [Homo | |
| | | biosynthesis | | | |
| 320-321 | CT22195 | CG7187 DNA binding | | (AY026310) single stranded | 351 |
| | | | | DNA binding protein-1 [Homo | |
| | | | | sapiens] | |
| 322-323 | CT22253 | CG7215 ubiquitin | UBIQUITIN_2, ubiquitin | P21126\|UBLG_MOUSE | 75.5 |
| | | | | Ubiquitin-like protein GDX | |
| | | | | (Ubiquitin-like protein 4) | |
| 324-325 | CT22861 | CG7434 RpL22 ribosomal | ANTIFREEZEI | (AF400188) ribosomal protein | 165 |
| | | protein L22 | | L22 [Spodoptera frugiperda] | |
| 326-327 | CT23083 | CG7552 unknown | ATP_GTP_A, | Homo sapiens ‘65 KD YES- | |
| | | | WW_DOMAIN_1, | ASSOCIATED PROTEIN | |
| | | | WW_DOMAIN_2, | (YAP65)’ SWP: P46937 | |
| | | | WW_rsp5_WWP | | |
| 328-329 | CT23596 | CG7757 similarity to | NLS_BP | (NM_004698) U4/U6-associated | 520 |
| | | U4/U6-associated RNA | | RNA splicing factor [Homo | |
| | | splicing factor | | sapiens] | |
| 330-331 | CT23626 | CG7770 cochaperonin in | | (NM_010385) H2-K region | 106 |
| | | process of ‘de novo’ | | expressed gene 2 [Mus | |
| | | protein folding | | musculus] | |
| 332-333 | CT23882 | CG7901 PP2A-B′ protein | ANTIFREEZEI | Mus musculus ‘protein | |
| | | phosphatase, protein | | phosphatase 2A B′a3 regulatory | |
| | | phosphatase type 2A | | subunit’ EMBL: U37353 | |
| | | regulator | | | |
| 334-335 | CT41698 | CG7958 unknown | | (AB033050) KIAA1224 protein | 427 |
| | | | | [Homo sapiens] | |
| 336-337 | CT23982 | CG7958 unknown | | (AB033050) KIAA1224 protein | 427 |
| | | | | [Homo sapiens] | |
| 338-339 | CT23998 | CG7983 guanylate kinase | PRO_RICH | (AF411837) transcription | 214 |
| | | | | repressor p66 [Mus musculus] | |
| 340-341 | CT24094 | CG8031 unknown | | (BC013819) CGI-27 protein | 394 |
| | | | | [Mus musculus] | |
| 342-343 | CT24122 | CG8037 ELL, DNA- | | Gallus gallus ‘OCCLUDIN’ | |
| | | directed RNA polymerase | | SWP: Q91049 | |
| | | III; | | | |
| 344-345 | CT24346 | CG8148 timeout timeout | | (NM_003920) timeless | 149 |
| | | | | (Drosophila) homolog [Homo | |
| | | | | sapiens] | |
| 346-347 | CT24393 | CG8189 ATPsyn-b | Acetyltransf | (AF187862) ATP synthase | 213 |
| | | ATPsyn-b Fo-ATP | | subunit B [Xenopus laevis] | |
| | | synthase subunit b | | | |
| 348-349 | CT24437 | CG8231 T-complex | CHAPERONIN60, | O77622\|TCPZ_RABIT T- | 754 |
| | | protein 1, zeta-subunit, | TCOMPLEXTCP1, TCP1_1, | COMPLEX PROTEIN 1, ZETA | |
| | | chaperone | TCP1_2, TCP1_3, cpn60_TCP1 | SUBUNIT (TCP-1-ZETA) | |
| | | | | (CCT-ZETA) | |
| 350-351 | CT18257 | CG8322 ATPCL ATP- | SUCCINYL_COA_LIG_1, | (U18197) ATP: citrate lyase | 1555 |
| | | citrate (pro-S)-lyase | SUCCINYL_COA_LIG_2, | [Homo sapiens] | |
| | | | SUCCINYL_COA_LIG_3, | | |
| | | | ligase-CoA | | |
| 352-353 | CT24731 | CG8439 Cct5 Cct5, T- | | (XM_052313) chaperonin | 791 |
| | | complex Chaperonin 5, | | containing TCP1, subunit 5 | |
| | | tracheal gasfilling mutant | | (epsilon) [Homo | |
| 354-355 | CT24823 | CG8484 Transcription | ZINC_FINGER_C2H2, | (NM_058230) zinc finger | 167 |
| | | factor | ZINC_FINGER_C2H2_2, zf- | protein 354B [Homo sapiens] | |
| | | | C2H2 | | |
| 356-357 | CT25072 | CG8655 CDC receptor | AA_TRNA_LIGASE_II_2, | (AF005209) HsCdc7 [Homo | 216 |
| | | signaling protein | PROTEIN_KINASE_DOM, | sapiens] | |
| | | serine/threonine kinase | PROTEIN_KINASE_ST, | | |
| | | | pkinase | | |
| 358-359 | CT25274 | CG8759 Nacalpha; NAC | | Homo sapiens & agr | |
| | | protein alpha subunit, | | PIR: S49326 | |
| | | component of the nascent | | | |
| | | polypeptide-associated | | | |
| | | complex | | | |
| 360-361 | CT25472 | CG8870 endopeptidase, | ANTENNAPEDIA, | Caenorhabditis elegans ‘similar | |
| | | monophenol | CHYMOTRYPSIN, | to plasminogen and to trypsin- | |
| | | monooxygenase activator | TRYPSIN_CATAL, | like serine proteases’ | |
| | | | TRYPSIN_HIS, | EMBL: U29380 | |
| | | | TRYPSIN_SER, trypsin | | |
| 362-363 | CT25624 | CG8922 RpS5 Ribosomal | RIBOSOMAL_S7, | (Y12431) 5S ribosomal protein | 353 |
| | | protein S5 | Ribosomal_S7 | [Mus musculus] | |
| 364-365 | CT8969 | CG9165 enzyme, | PORPHBDMNASE, | P08397\|HEM3_HUMAN | 287 |
| | | hydroxymethylbilane | Porphobil_deam | PORPHOBILINOGEN | |
| | | synthase | | DEAMINASE | |
| | | | | (HYDROXYMETHYLBILANE | |
| | | | | SYNTHASE) (HMBS) | |
| 366-367 | CT27084 | CG9591 unknown | | (XM_043261) KIAA1698 | 116 |
| | | | | protein [Homo sapiens] | |
| 368-369 | CT27543 | CG9748 cap Belle, ATP | | 1705301A ATP dependent | 723 |
| | | dependent helicase | | RNA helicase [Xenopus laevis] | |
| 370-371 | CT27750 | CG9821 unknown | | none | |
| 372-373 | CT27796 | CG9901 Arp14D Actin- | ACTIN, ACTINS_ACT_LIKE, | P53488\|ARP2_CHICK ACTIN- | 678 |
| | | related protein 14D, arp2 | actin | LIKE PROTEIN 2 (ACTIN- | |
| | | | | LIKE PROTEIN ACTL) | |
| 374-375 | CT27906 | CG9910 katanin-80 | | (AF052433) katanin p80 subunit | 231 |
| | | katanin 80, microtubule | | [Strongylocentrotus purpuratus] | |
| | | severing which is a | | | |
| | | component of the katanin | | | |
| 376-377 | CT27940 | CG9924 transcription | BTB, MATH | (NM_003563) speckle-type POZ | 599 |
| | | factor | | protein [Homo sapiens] | |
| 378-379 | CT27993 | CG9946 eIF-2alpha; | NLS_BP, S1 | (NM_131800) eIF2 alpha | 376 |
| | | Eukaryotic initiation | | subunit [Danio rerio] | |
| | | factor 2A; translation | | | |
| | | initiation factor | | | |
| 380-381 | CT20536 | CG6606 unknown | ATPASE_ALPHA_BETA, | (AB020664) KIAA0857 protein | 122 |
| | | | ATP_GTP_A, C2, NLS_BP, | [Homo sapiens] | |
| | | | RECEPTOR_CYTOKINES_2 | | |

### DEFINITIONS

[0021] For clarity, certain terms used in the specification are defined and used as follows:

[0022] “Associated with/operatively linked” refer to two nucleic acid sequences that are related physically or functionally. For example, a promoter or regulatory DNA sequence is said to be “associated with” a DNA sequence that codes for an RNA or a protein if the two sequences are operatively linked, or situated such that the regulator DNA sequence will affect the expression level of the coding or structural DNA sequence.

[0023] A “chimeric construct” is a recombinant nucleic acid sequence in which a promoter or regulatory nucleic acid sequence is operatively linked to, or associated with, a nucleic acid sequence that codes for an mRNA or which is expressed as a protein, such that the regulatory nucleic acid sequence is able to regulate transcription or expression of the associated nucleic acid sequence. The regulatory nucleic acid sequence of the chimeric construct is not normally operatively linked to the associated nucleic acid sequence as found in nature.

[0024] Co-factor: natural reactant, such as an organic molecule or a metal ion, required in an enzyme-catalyzed reaction. A co-factor is e.g. NAD(P), riboflavin (including FAD and FMN), folate, molybdopterin, thiamin, biotin, lipoic acid, pantothenic acid and coenzyme A, S-adenosylmethionine, pyridoxal phosphate, ubiquinone, menaquinone. Optionally, a co-factor can be regenerated and reused.

[0025] A “coding sequence” is a nucleic acid sequence that is transcribed into RNA such as mRNA, rRNA, tRNA, snRNA, sense RNA or antisense RNA. Preferably the RNA is then translated in an organism to produce a protein.

[0026] Complementary: “complementary” refers to two nucleotide sequences that comprise antiparallel nucleotide sequences capable of pairing with one another upon formation of hydrogen bonds between the complementary base residues in the antiparallel nucleotide sequences.

[0027] “Conservatively modified variations” of a particular nucleic acid sequence refers to those nucleic acid sequences that encode identical or essentially identical amino acid sequences, or where the nucleic acid sequence does not encode an amino acid sequence, to essentially identical sequences. Because of the degeneracy of the genetic code, a large number of functionally identical nucleic acids encode any given polypeptide. For instance the codons CGT, CGC, CGA, CGG, AGA, and AGG all encode the amino acid arginine. Thus, at every position where an arginine is specified by a codon, the codon can be altered to any of the corresponding codons described without altering the encoded protein. Such nucleic acid variations are “silent variations” which are one species of “conservatively modified variations.” Every nucleic acid sequence described herein which encodes a protein also describes every possible silent variation, except where otherwise noted. One of skill will recognize that each codon in a nucleic acid (except ATG, which is ordinarily the only codon for methionine) can be modified to yield a functionally identical molecule by standard techniques. Accordingly, each “silent variation” of a nucleic acid which encodes a protein is implicit in each described sequence.

[0028] Furthermore, one of skill will recognize that individual substitutions deletions or additions that alter, add or delete a single amino acid or a small percentage of amino acids (typically less than 5%, more typically less than 1%) in an encoded sequence are “conservatively modified variations,” where the alterations result in the substitution of an amino acid with a chemically similar amino acid. Conservative substitution tables providing functionally similar amino acids are well known in the art. The following five groups each contain amino acids that are conservative substitutions for one another: Aliphatic: Glycine (G), Alanine (A), Valine (V), Leucine (L), Isoleucine (I); Aromatic: Phenylalanine (F), Tyrosine (Y), Tryptophan (W); Sulfur-containing: Methionine (M), Cysteine (C); Basic: Arginine R), Lysine (K), Histidine (H); Acidic: Aspartic acid (D), Glutamic acid (E), Asparagine (N), Glutamine (Q). See also, Creighton (1984) Proteins, W. H. Freeman and Company. In addition, individual substitutions, deletions or additions which alter, add or delete a single amino acid or a small percentage of amino acids in an encoded sequence are also “conservatively modified variations.”

[0029] DNA Shuffling: DNA shuffling is a method to rapidly, easily and efficiently introduce mutations or rearrangements, preferably randomly, in a DNA molecule or to generate exchanges of DNA sequences between two or more DNA molecules, preferably randomly. The DNA molecule resulting from DNA shuffling is a shuffled DNA molecule that is a non-naturally occurring DNA molecule derived from at least one template DNA molecule. The shuffled DNA encodes an enzyme modified with respect to the enzyme encoded by the template DNA, and preferably has an altered biological activity with respect to the enzyme encoded by the template DNA.

[0030] Enzyme/Protein Activity: means herein the ability of an enzyme (or protein) to catalyze the conversion of a substrate into a product. A substrate for the enzyme comprises the natural substrate of the enzyme but also comprises analogues of the natural substrate, which can also be converted, by the enzyme into a product or into an analogue of a product. The activity of the enzyme is measured for example by determining the amount of product in the reaction after a certain period of time, or by determining the amount of substrate remaining in the reaction mixture after a certain period of time. The activity of the enzyme is also measured by determining the amount of an unused co-factor of the reaction remaining in the reaction mixture after a certain period of time or by determining the amount of used co-factor in the reaction mixture after a certain period of time. The activity of the enzyme is also measured by determining the amount of a donor of free energy or energy-rich molecule (e.g. ATP, phosphoenolpyruvate, acetyl phosphate or phosphocreatine) remaining in the reaction mixture after a certain period of time or by determining the amount of a used donor of free energy or energy-rich molecule (e.g. ADP, pyruvate, acetate or creatine) in the reaction mixture after a certain period of time.

[0031] Essential: an “essential” Drosophila melanogaster nucleotide sequence is a nucleotide sequence encoding a protein such as e.g. a biosynthetic enzyme, receptor, signal transduction protein, structural gene product, or transport protein that is essential to the growth or survival of the insect.

[0032] Expression Cassette: “Expression cassette” as used herein means a DNA sequence capable of directing expression of a particular nucleotide sequence in an appropriate host cell, comprising a promoter operatively linked to the nucleotide sequence of interest which is operatively linked to termination signals. It also typically comprises sequences required for proper translation of the nucleotide sequence. The coding region usually codes for a protein of interest but may also code for a functional RNA of interest, for example antisense RNA or a nontranslated RNA, in the sense or antisense direction. The expression cassette comprising the nucleotide sequence of interest may be chimeric, meaning that at least one of its components is heterologous with respect to at least one of its other components. The expression cassette may also be one which is naturally occurring but has been obtained in a recombinant form useful for heterologous expression. Typically, however, the expression cassette is heterologous with respect to the host, i.e., the particular DNA sequence of the expression cassette does not occur naturally in the host cell and must have been introduced into the host cell or an ancestor of the host cell by a transformation event. The expression of the nucleotide sequence in the expression cassette may be under the control of a constitutive promoter or of an inducible promoter which initiates transcription only when the host cell is exposed to some particular external stimulus. In the case of a multicellular organism, such as an insect, the promoter can also be specific to a particular tissue or organ or stage of development.

[0033] Gene: the term “gene” is used broadly to refer to any segment of DNA associated with a biological function. Thus, genes include coding sequences and/or the regulatory sequences required for their expression. Genes also include nonexpressed DNA segments that, for example, form recognition sequences for other proteins. Genes can be obtained from a variety of sources, including cloning from a source of interest or synthesizing from known or predicted sequence information, and may include sequences designed to have desired parameters.

[0034] Heterologous/exogenous: The terms “heterologous” and “exogenous” when used herein to refer to a nucleic acid sequence (e.g. a DNA sequence) or a gene, refer to a sequence that originates from a source foreign to the particular host cell or, if from the same source, is modified from its original form. Thus, a heterologous gene in a host cell includes a gene that is endogenous to the particular host cell but has been modified through, for example, the use of DNA shuffling. The terms also include non-naturally occurring multiple copies of a naturally occurring DNA sequence. Thus, the terms refer to a DNA segment that is foreign or heterologous to the cell, or homologous to the cell but in a position within the host cell nucleic acid in which the element is not ordinarily found. Exogenous DNA segments are expressed to yield exogenous polypeptides.

[0035] A “homologous” nucleic acid (e.g. DNA) sequence is a nucleic acid (e.g. DNA) sequence naturally associated with a host cell into which it is introduced.

[0036] The terms “identical” or percent “identity” in the context of two or more nucleic acid or protein sequences, refer to two or more sequences or subsequences that are the same or have a specified percentage of amino acid residues or nucleotides that are the same, when compared and aligned for maximum correspondence, as measured using one of the following sequence comparison algorithms or by visual inspection.

[0037] Inhibitor: a chemical substance that inactivates the enzymatic activity of an enzyme (or protein) of interest The term “insecticide” is used herein to define an inhibitor when applied to an insect at any stage of development

[0038] Insecticide: a chemical substance used to kill or inhibit the growth or viability of insects at any stage of development.

[0039] Interaction: quality or state of mutual action such that the effectiveness or toxicity of one protein or compound on another protein is inhibitory (antagonists) or enhancing (agonists).

[0040] A nucleic acid sequence is “isocoding with” a reference nucleic acid sequence when the nucleic acid sequence encodes a polypeptide having the same amino acid sequence as the polypeptide encoded by the reference nucleic acid sequence.

[0041] An “isolated” nucleic acid molecule or an isolated enzyme is a nucleic acid molecule or enzyme that, by the hand of man, exists apart from its native environment and is therefore not a product of nature. An isolated nucleic acid molecule or enzyme may exist in a purified form or may exist in a non-native environment such as, for example, a recombinant host cell.

[0042] Mature Protein: protein that is normally targeted to a cellular organelle and from which the transit peptide has been removed.

[0043] Minimal Promoter: promoter elements, particularly a TATA element, that are inactive or that have greatly reduced promoter activity in the absence of upstream activation. In the presence of a suitable transcription factor, the minimal promoter functions to permit transcription.

[0044] Modified Enzyme Activity: enzyme activity different from that which naturally occurs in an insect (i.e. enzyme activity that occurs naturally in the absence of direct or indirect manipulation of such activity by man), which is tolerant to inhibitors that inhibit the naturally occurring enzyme activity.

[0045] Native: refers to a gene that is present in the genome of an untransformed insect cell.

[0046] Naturally occurring: the term “naturally occurring” is used to describe an object that can be found in nature as distinct from being artificially produced by man. For example, a protein or nucleotide sequence present in an organism (including a virus), which can be isolated from a source in nature and which has not been intentionally modified by man in the laboratory, is naturally occurring.

[0047] Nucleic acid: the term “nucleic acid” refers to deoxyribonucleotides or ribonucleotides and polymers thereof in either single- or double-stranded form. Unless specifically limited, the term encompasses nucleic acids containing known analogues of natural nucleotides which have similar binding properties as the reference nucleic acid and are metabolized in a manner similar to naturally occurring nucleotides. Unless otherwise indicated, a particular nucleic acid sequence also implicitly encompasses conservatively modified variants thereof (e.g. degenerate codon substitutions) and complementary sequences and as well as the sequence explicitly indicated. Specifically, degenerate codon substitutions may be achieved by generating sequences in which the third position of one or more selected (or all) codons is substituted with mixed-base and/or deoxyinosine residues (Batzer et al., Nucleic Acid Res. 19: 5081 (1991); Ohtsuka et al., J. Biol. Chem. 260: 2605-2608 (1985); Rossolini et al., Mol. Cell Probes 8: 91-98 (1994)). The terms “nucleic acid” or “nucleic acid sequence” may also be used interchangeably with gene, cDNA, and mRNA encoded by a gene.

[0048] “ORF” means open reading frame.

[0049] Purified: the term “purified,” when applied to a nucleic acid or protein, denotes that the nucleic acid or protein is essentially free of other cellular components with which it is associated in the natural state. It is preferably in a homogeneous state although it can be in either a dry or aqueous solution. Purity and homogeneity are typically determined using analytical chemistry techniques such as polyacrylamide gel electrophoresis or high performance liquid chromatography. A protein which is the predominant species present in a preparation is substantially purified. The term “purified” denotes that a nucleic acid or protein gives rise to essentially one band in an electrophoretic gel. Particularly, it means that the nucleic acid or protein is at least about 50% pure, more preferably at least about 85% pure, and most preferably at least about 99% pure.

[0050] Two nucleic acids are “recombined” when sequences from each of the two nucleic acids are combined in a progeny nucleic acid. Two sequences are “directly” recombined when both of the nucleic acids are substrates for recombination. Two sequences are “indirectly recombined” when the sequences are recombined using an intermediate such as a cross-over oligonucleotide. For indirect recombination, no more than one of the sequences is an actual substrate for recombination, and in some cases, neither sequence is a substrate for recombination.

[0051] “Regulatory elements” refer to sequences involved in controlling the expression of a nucleotide sequence. Regulatory elements comprise a promoter operatively linked to the nucleotide sequence of interest and termination signals. They also typically encompass sequences required for proper translation of the nucleotide sequence.

[0052] Significant Increase: an increase in enzymatic activity that is larger than the margin of error inherent in the measurement technique, preferably an increase by about 2-fold or greater of the activity of the wild-type enzyme in the presence of the inhibitor, more preferably an increase by about 5-fold or greater, and most preferably an increase by about 10-fold or greater.

[0053] Substantially identical: the phrase “substantially identical,” in the context of two nucleic acid or protein sequences, refers to two or more sequences or subsequences that have at least 60%, preferably 80%, more preferably 90, even more preferably 95%, and most preferably at least 99% nucleotide or amino acid residue identity, when compared and aligned for maximum correspondence, as measured using one of the following sequence comparison algorithms or by visual inspection. Preferably, the substantial identity exists over a region of the sequences that is at least about 50 residues in length, more preferably over a region of at least about 100 residues, and most preferably the sequences are substantially identical over at least about 150 residues. In an especially preferred embodiment, the sequences are substantially identical over the entire length of the coding regions. Furthermore, substantially identical nucleic acid or protein sequences perform substantially the same function.

[0054] For sequence comparison, typically one sequence acts as a reference sequence to which test sequences are compared. When using a sequence comparison algorithm, test and reference sequences are input into a computer, subsequence coordinates are designated if necessary, and sequence algorithm program parameters are designated. The sequence comparison algorithm then calculates the percent sequence identity for the test sequence(s) relative to the reference sequence, based on the designated program parameters.

[0055] Optimal alignment of sequences for comparison can be conducted, e.g., by the local homology algorithm of Smith & Waterman, Adv. Appl. Math. 2: 482 (1981), by the homology alignment algorithm of Needleman & Wunsch, J. Mol. Biol. 48: 443 (1970), by the search for similarity method of Pearson & Lipman, Proc. Nat'l. Acad. Sci. USA 85: 2444 (1988), by computerized implementations of these algorithms (GAP, BESTFIT, FASTA, and TFASTA in the Wisconsin Genetics Software Package, Genetics Computer Group, 575 Science Dr., Madison, Wis,), or by visual inspection (see generally, Ausubel et al., infra).

[0056] One example of an algorithm that is suitable for determining percent sequence identity and sequence similarity is the BLAST algorithm, which is described in Altschul et al., J. Mol. Biol. 215: 403410 (1990). Software for performing BLAST analyses is publicly available through the National Center for Biotechnology Information on the world wide web at ncbi.nlm.nih.gov/. This algorithm involves first identifying high scoring sequence pairs (HSPs) by identifying short words of length W in the query sequence, which either match or satisfy some positive-valued threshold score T when aligned with a word of the same length in a database sequence. T is referred to as the neighborhood word score threshold (Altschul et al., 1990). These initial neighborhood word hits act as seeds for initiating searches to find longer HSPs containing them. The word hits are then extended in both directions along each sequence for as far as the cumulative alignment score can be increased. Cumulative scores are calculated using, for nucleotide sequences, the parameters M (reward score for a pair of matching residues; always >0) and N (penalty score for mismatching residues; always <0). For amino acid sequences, a scoring matrix is used to calculate the cumulative score. Extension of the word hits in each direction are halted when the cumulative alignment score falls off by the quantity X from its maximum achieved value, the cumulative score goes to zero or below due to the accumulation of one or more negative-scoring residue alignments, or the end of either sequence is reached. The BLAST algorithm parameters W, T, and X determine the sensitivity and speed of the alignment. The BLASTN program (for nucleotide sequences) uses as defaults a wordlength (W) of 11, an expectation (E) of 10, a cutoff of 100, M=5, N=−4, and a comparison of both strands. For amino acid sequences, the BLASTP program uses as defaults a wordlength (W) of 3, an expectation (E) of 10, and the BLOSUM62 scoring matrix (see Henikoff & Henikoff, Proc. Natl. Acad. Sci. USA 89:10915 (1989)).

[0057] In addition to calculating percent sequence identity, the BLAST algorithm also performs a statistical analysis of the similarity between two sequences (see, e.g., Karlin & Altschul, Proc. Nat'l. Acad. Sci. USA 90: 5873-5787 (1993)). One measure of similarity provided by the BLAST algorithm is the smallest sum probability (P(N)), which provides an indication of the probability by which a match between two nucleotide or amino acid sequences would occur by chance. For example, a test nucleic acid sequence is considered similar to a reference sequence if the smallest sum probability in a comparison of the test nucleic acid sequence to the reference nucleic acid sequence is less than about 0.1, more preferably less than about 0.01, and most preferably less than about 0.001.

[0058] Another indication that two nucleic acid sequences are substantially identical is that the two molecules hybridize to each other under stringent conditions. The phrase “hybridizing specifically to” refers to the binding, duplexing, or hybridizing of a molecule only to a particular nucleotide sequence under stringent conditions when that sequence is present in a complex mixture (e.g., total cellular) DNA or RNA. “Bind(s) substantially” refers to complementary hybridization between a probe nucleic acid and a target nucleic acid and embraces minor mismatches that can be accommodated by reducing the stringency of the hybridization media to achieve the desired detection of the target nucleic acid sequence.

[0059] “Stringent hybridization conditions” and “stringent hybridization wash conditions” in the context of nucleic acid hybridization experiments such as Southern and Northern hybridizations are sequence dependent, and are different under different environmental parameters. Longer sequences hybridize specifically at higher temperatures. An extensive guide to the hybridization of nucleic acids is found in Tijssen (1993) Laboratory Techniques in Biochemistry and Molecular Biology-Hybridization with Nucleic Acid Probes part I chapter 2 “Overview of principles of hybridization and the strategy of nucleic acid probe assays” Elsevier, N.Y. Generally, highly stringent hybridization and wash conditions are selected to be about 5° C. lower than the thermal melting point (Tₘ) for the specific sequence at a defined ionic strength and pH. Typically, under “stringent conditions” a probe will hybridize to its target subsequence, but to no other sequences.

[0060] The Tₘ is the temperature (under defined ionic strength and pH) at which 50% of the target sequence hybridizes to a perfectly matched probe. Very stringent conditions are selected to be equal to the Tₘ for a particular probe. An example of stringent hybridization conditions for hybridization of complementary nucleic acids which have more than 100 complementary residues on a filter in a Southern or northern blot is 50% formamide with 1 mg of heparin at 42° C., with the hybridization being carried out overnight. An example of highly stringent wash conditions is 0.1 5M NaCl at 72° C. for about 15 minutes. An example of stringent wash conditions is a 0.2×SSC wash at 65° C. for 15 minutes (see, Sambrook, infra, for a description of SSC buffer). Often, a high stringency wash is preceded by a low stringency wash to remove background probe signal. An example medium stringency wash for a duplex of, e.g., more than 100 nucleotides, is 1×SSC at 45° C. for 15 minutes. An example low stringency wash for a duplex of, e.g., more than 100 nucleotides, is 4-6×SSC at 40° C. for 15 minutes. For short probes (e.g., about 10 to 50 nucleotides), stringent conditions typically involve salt concentrations of less than about 1.0 M Na ion, typically about 0.01 to 1.0 M Na ion concentration (or other salts) at pH 7.0 to 8.3, and the temperature is typically at least about 30° C. Stringent conditions can also be achieved with the addition of destabilizing agents such as formamide. In general, a signal to noise ratio of 2× (or higher) than that observed for an unrelated probe in the particular hybridization assay indicates detection of a specific hybridization. Nucleic acids that do not hybridize to each other under stringent conditions are still substantially identical if the proteins that they encode are substantially identical. This occurs, e.g., when a copy of a nucleic acid is created using the maximum codon degeneracy permitted by the genetic code.

[0061] The following are examples of sets of hybridization/wash conditions that may be used to clone homologous nucleotide sequences that are substantially identical to reference nucleotide sequences of the present invention: a reference nucleotide sequence preferably hybridizes to the reference nucleotide sequence in 7% sodium dodecyl sulfate (SDS), 0.5 M NaPO₄, 1 mM EDTA at 50° C. with washing in 2×SSC, 0.1% SDS at 50° C., more desirably in 7% sodium dodecyl sulfate (SDS), 0.5 M NaPO₄, 1 mM EDTA at 50° C. with washing in 1×SSC, 0.1% SDS at 50° C., more desirably still in 7% sodium dodecyl sulfate (SDS), 0.5 M NaPO₄, 1 mM EDTA at 50° C. with washing in 0.5×SSC, 0.1% SDS at 50° C., preferably in 7% sodium dodecyl sulfate (SDS), 0.5 M NaPO₄, 1 mM EDTA at 50° C. with washing in 0.1×SSC, 0.1% SDS at 50° C., more preferably in 7% sodium dodecyl sulfate (SDS), 0.5 M NaPO₄, 1 mM EDTA at 50° C. with washing in 0.1×SSC, 0.1% SDS at 65° C.

[0062] A further indication that two nucleic acid sequences or proteins are substantially identical is that the protein encoded by the first nucleic acid is immunologically cross reactive with, or specifically binds to, the protein encoded by the second nucleic acid. Thus, a protein is typically substantially identical to a second protein, for example, where the two proteins differ only by conservative substitutions.

[0063] The phrase “specifically (or selectively) binds to an antibody,” or “specifically (or selectively) immunoreactive with,” when referring to a protein or peptide, refers to a binding reaction which is determinative of the presence of the protein in the presence of a heterogeneous population of proteins and other biologics. Thus, under designated immunoassay conditions, the specified antibodies bind to a particular protein and do not bind in a significant amount to other proteins present in the sample. Specific binding to an antibody under such conditions may require an antibody that is selected for its specificity for a particular protein. For example, antibodies raised to the protein with the amino acid sequence encoded by any of the nucleic acid sequences of the invention can be selected to obtain antibodies specifically immunoreactive with that protein and not with other proteins except for polymorphic variants. A variety of immunoassay formats may be used to select antibodies specifically immunoreactive with a particular protein. For example, solid-phase ELISA immunoassays, Western blots, or immunohistochemistry are routinely used to select monoclonal antibodies specifically immunoreactive with a protein. See Harlow and Lane (1988) Antibodies, A Laboratory Manual, Cold Spring Harbor Publications, New York “Harlow and Lane”), for a description of immunoassay formats and conditions that can be used to determine specific immunoreactivity. Typically a specific or selective reaction will be at least twice background signal or noise and more typically more than 10 to 100 times background.

[0064] A “subsequence” refers to a sequence of nucleic acids or amino acids that comprise a part of a longer sequence of nucleic acids or amino acids (e.g., protein) respectively.

[0065] “Synthetic” refers to a nucleotide sequence comprising structural characters that are not present in the natural sequence. For example, an artificial sequence that resembles more closely the G+C content and the normal codon distribution of dicot and/or monocot genes is said to be synthetic.

[0066] Substrate: a substrate is the molecule that an enzyme naturally recognizes and converts to a product in the biochemical pathway in which the enzyme naturally carries out its function, or is a modified version of the molecule, which is also recognized by the enzyme and is converted by the enzyme to a product in an enzymatic reaction similar to the naturally-occurring reaction.

[0067] Target gene: A “target gene” is any gene in an insect cell. For example, a target gene is a gene of known function or is a gene whose function is unknown, but whose total or partial nucleotide sequence is known. Alternatively, the function of a target gene and its nucleotide sequence are both unknown. A target gene is a native gene of the insect cell or is a heterologous gene that had previously been introduced into the insect cell or a parent cell of said insect cell, for example by genetic transformation. A heterologous target gene is stably integrated in the genome of the insect cell or is present in the insect cell as an extrachromosomal molecule, e.g. as an autonomously replicating extrachromosomal molecule.

[0068] Transformation: a process for introducing heterologous DNA into a cell, tissue, or insect Transformed cells, tissues, or insects are understood to encompass not only the end product of a transformation process, but also transgenic progeny thereof.

[0069] “Transformed,” “transgenic,” and “recombinant” refer to a host organism such as a bacterium or a plant into which a heterologous nucleic acid molecule has been introduced. The nucleic acid molecule can be stably integrated into the genome of the host or the nucleic acid molecule can also be present as an extrachromosomal molecule. Such an extrachromosomal molecule can be auto-replicating. Transformed cells, tissues, or plants are understood to encompass not only the end product of a transformation process, but also transgenic progeny thereof. A “non-transformed,” “non-transgenic,” or “non-recombinant” host refers to a wild-type organism, e.g., a bacterium or plant, which does not contain the heterologous nucleic acid molecule.

[0070] Viability: “viability” as used herein refers to a fitness parameter of an insect. Insects are assayed for their homozygous performance of Drosophila development, indicating which proteins are indispensable to maintain life in Drosophila.

### DETAILED DESCRIPTION OF THE INVENTION

I. Identification Of Essential Drosophila melanogaster Nucleotide Sequences Using Transposable Element Insertion Mutagenesis

[0071] As shown in Table 2 and the examples below, the identification of novel nucleotide sequences, as well as the essentiality of the nucleotide sequences for normal insect viability, have been demonstrated in Drosophila using P-element transposable insertion mutagenesis. Having established the essentiality of the function of the encoded proteins in Drosophila and having identified the nucleotide sequences encoding these essential proteins, the inventors thereby provide an important and sought-after tool for new insecticide development.

[0072] A lethal phenotype caused by insertion of a P-element indicates that the affected nucleotide sequence codes for an essential protein in the insect. The characterization of the insertion site using flanking sequence DNA is needed to associate an individual lethal line with specific nucleotide sequences. Genomic DNA adjacent to the 5′ and/or 3′ end of the P-element from the insertion line is generated using inverse PCR.

TABLE 2
Method of validation of nucleic acid sequences as essential

| SEQ ID | |
|---|---|
| NO | validation method |
| 14 | dsRNA and p-element disruption |
| 16 | p-element disruption |
| 18 | p-element disruption |
| 20 | p-element disruption |
| 22 | p-element disruption |
| 24 | p-element disruption |
| 26 | p-element disruption |
| 28 | p-element disruption |
| 30 | dsRNA |
| 32 | p-element disruption |
| 34 | p-element disruption |
| 36 | p-element disruption |
| 38 | p-element disruption |
| 40 | p-element disruption |
| 42 | dsRNA |
| 44 | p-element disruption |
| 46 | p-element disruption |
| 48 | p-element disruption |
| 50 | p-element disruption |
| 52 | DsRNA |
| 54 | p-element disruption |
| 56 | p-element disruption |
| 58 | p-element disruption |
| 60 | p-element disruption |
| 62 | p-element disruption |
| 64 | p-element disruption |
| 66 | p-element disruption |
| 68 | DsRNA |
| 70 | DsRNA |
| 72 | DsRNA |
| 74 | p-element disruption |
| 76 | p-element disruption |
| 78 | p-element disruption |
| 80 | p-element disruption |
| 82 | p-element disruption |
| 84 | p-element disruption |
| 86 | DsRNA |
| 88 | p-element disruption |
| 90 | p-element disruption |
| 92 | p-element disruption |
| 94 | p-element disruption |
| 96 | p-element disruption |
| 98 | p-element disruption |
| 100 | p-element disruption |
| 102 | p-element disruption |
| 104 | p-element disruption |
| 106 | dsRNA and p-element disruption |
| 108 | p-element disruption |
| 110 | DsRNA |
| 112 | p-element disruption |
| 114 | DsRNA |
| 116 | p-element disruption |
| 118 | p-element disruption |
| 120 | p-element disruption |
| 122 | p-element disruption |
| 124 | p-element disruption |
| 126 | p-element disruption |
| 128 | p-element disruption |
| 130 | p-element disruption |
| 132 | p-element disruption |
| 134 | p-element disruption |
| 136 | p-element disruption |
| 138 | p-element disruption |
| 140 | p-element disruption |
| 142 | p-element disruption |
| 144 | p-element disruption |
| 146 | p-element disruption |
| 148 | p-element disruption |
| 150 | p-element disruption |
| 152 | p-element disruption |
| 154 | p-element disruption |
| 156 | p-element disruption |
| 158 | p-element disruption |
| 160 | DsRNA |
| 162 | p-element disruption |
| 164 | p-element disruption |
| 166 | p-element disruption |
| 168 | p-element disruption |
| 170 | p-element disruption |
| 172 | p-element disruption |
| 174 | p-element disruption |
| 176 | p-element disruption |
| 178 | p-element disruption |
| 180 | p-element disruption |
| 182 | p-element disruption |
| 184 | p-element disruption |
| 186 | p-element disruption |
| 188 | p-element disruption |
| 190 | p-element disruption |
| 192 | p-element disruption |
| 194 | DsRNA |
| 196 | p-element disruption |
| 198 | p-element disruption |
| 200 | p-element disruption |
| 202 | p-element disruption |
| 204 | DsRNA |
| 206 | p-element disruption |
| 208 | p-element disruption |
| 210 | p-element disruption |
| 212 | p-element disruption |
| 214 | DsRNA |
| 216 | p-element disruption |
| 218 | p-element disruption |
| 220 | p-element disruption |
| 222 | DsRNA |
| 224 | p-element disruption |
| 226 | p-element disruption |
| 227 | p-element disruption |
| 228 | p-element disruption |
| 230 | p-element disruption |
| 232 | p-element disruption |
| 234 | p-element disruption |
| 236 | p-element disruption |
| 238 | p-element disruption |
| 240 | p-element disruption |
| 242 | p-element disruption |
| 244 | DsRNA |
| 246 | p-element disruption |
| 248 | p-element disruption |
| 250 | p-element disruption |
| 252 | p-element disruption |
| 254 | p-element disruption |
| 256 | p-element disruption |
| 258 | p-element disruption |
| 260 | p-element disruption |
| 262 | p-element disruption |
| 264 | p-element disruption |
| 266 | p-element disruption |
| 268 | p-element disruption |
| 270 | p-element disruption |
| 272 | dsRNA and p-element disruption |
| 274 | p-element disruption |
| 276 | p-element disruption |
| 278 | p-element disruption |
| 280 | p-element disruption |
| 282 | p-element disruption |
| 284 | p-element disruption |
| 286 | DsRNA |
| 288 | DsRNA |
| 290 | p-element disruption |
| 292 | p-element disruption |
| 294 | p-element disruption |
| 296 | DsRNA |
| 298 | DsRNA |
| 300 | p-element disruption |
| 302 | p-element disruption |
| 304 | p-element disruption |
| 306 | p-element disruption |
| 308 | p-element disruption |
| 310 | p-element disruption |
| 312 | p-element disruption |
| 314 | p-element disruption |
| 316 | p-element disruption |
| 318 | p-element disruption |
| 320 | p-element disruption |
| 322 | p-element disruption |
| 324 | p-element disruption |
| 326 | p-element disruption |
| 328 | p-element disruption |
| 330 | p-element disruption |
| 332 | p-element disruption |
| 334 | p-element disruption |
| 336 | p-element disruption |
| 338 | p-element disruption |
| 340 | p-element disruption |
| 342 | dsRNA and p-element disruption |
| 344 | DsRNA |
| 346 | p-element disruption |
| 348 | dsRNA and p-element disruption |
| 350 | DsRNA |
| 352 | dsRNA and p-element disruption |
| 354 | p-element disruption |
| 356 | p-element disruption |
| 358 | dsRNA and p-element disruption |
| 360 | p-element disruption |
| 362 | p-element disruption |
| 364 | p-element disruption |
| 366 | p-element disruption |
| 368 | DsRNA |
| 370 | p-element disruption |
| 372 | p-element disruption |
| 374 | p-element disruption |
| 376 | p-element disruption |
| 378 | p-element disruption |
| 380 | p-element disruption |

I. Determining the Complete Coding Sequences of the Essential Drosophila Nucleotide Sequences

[0073] The essential Drosophila nucleotide sequences are identified by isolating nucleotide sequences flanking the P-element insertion and aligning that sequence with genomic Drosophila sequence obtained from the Celera Drosophila database. The protein prediction for each genomic region is obtained by use of an exon algorithm program such as GeneMark. All exon algorithm programs currently used for prediction of proteins are susceptible to inaccuracies, including incomplete predictions of coding sequences, missing alternative splice variants, combining of nearby exons of adjacent genes, and mistranslation at intron-exon borders. The prediction of a complete coding sequence can be confirmed by several methods including polymerase chain reaction (PCR) amplification using the 5′ and 3′ sequence to verify the message, reverse transcription PCR (rtPCR) using an oligonucleotide internal sequence to identify the 5′ and/or 3′ end, and screening of cDNA libraries from insect tissues with probes made from a particular sequence to isolate a true full-length clone. To confirm that the message size is accurate, a Northern blot can be hybridized with a probe from the nucleotide sequence. In addition, matches to the Drosophila EST database helps to confirm existence of message and gives information about the temporal and spatial pattern of expression. Mutation-causing P elements are known to preferentially cluster in the 5′ region of affected genes (Spradling et al, Proc. Natl. Acad. Sci. USA 92: 10824-10830 (1995)), a tendency that increases the chance of recovering overlaps between short flanking sequences and 5′ ESTs. The present invention therefore provides a number of essential nucleotide sequences as well as the amino acid sequences encoded thereby. cDNA clone sequences are set forth in even numbered SEQ ID NOs:14-380. The corresponding encoded amino acid sequences are set forth in odd numbered SEQ ID NOs:15-381.

[0074] The isolated gene sequences disclosed herein may be manipulated according to standard genetic engineering techniques to suit any desired purpose. For example, an entire Drosophila gene sequence or portions thereof may be used as a probe capable of specifically hybridizing to coding sequences and messenger RNAs. To achieve specific hybridization under a variety of conditions, such probes include, e.g. sequences that are unique among insect nucleotide sequences for a particular protein of interest and are at least 10 nucleotides in length, preferably at least 20 nucleotides in length, and most preferably at least 50 nucleotides in length. Such probes are used to amplify and analyze related nucleotide sequences from a chosen organism via PCR. This technique is useful to isolate additional insect nucleotide sequences from a desired organism or as a diagnostic assay to determine the presence of particular nucleotide sequences in an organism. This technique also is used to detect the presence of altered nucleotide sequences associated with a particular condition of interest such as insecticide tolerance, poor health, etc.

[0075] Gene-specific hybridization probes also are used to quantify levels of a particular gene mRNA in an insect using standard techniques such as Northern blot analysis. This technique is useful as a diagnostic assay to detect altered levels of gene expression that are associated with particular conditions such as enhanced tolerance to insecticides that target a particular gene.

[0076] I.A. Identification of Essential Drosophila melannogaster Nucleotide Sequences Using RNAi

[0077] RNA-mediated interference (RNAi) is a recently discovered method to determine gene function in a number of organisms, wherein double-stranded RNA (dsRNA) directs gene-specific, post-transcriptional silencing. See, e.g., Kuwabara & Olson (2000) Parasitol Today 16(8):347-349; Bass (2000) Cell 101(3):235-238; Hunter (2000) Curr Biol 10(4):R137-140; Bosher & Labouesse (2000) Nat Cell Biol 2(2):E31-36; Sharp (1999) Genes Dev 13(2):139-141. The double-stranded RNA molecule can be synthesized in vitro and then introduced into the organism by injection or other methods. Alternatively, a heritable transgene exhibiting dyad symmetry can provide a transcript that folds as a hairpin structure. Methods for examining gene functions using dsRNAi in Drosophila are disclosed in Example 4a and further in Kennerdell & Carthew (2000) Nat Biotech 18(8):896-898; Lam & Thummel (2000) Curr Biol 10(16):957-963; Misquitta & Paterson (1999) Proc Natl Acad Sci USA 96 (4):1451-1456. The present invention describes RNA-mediated interference of sequences listed in Table 2 and Table 6. Double-stranded RNA complementary to each sequence was synthesized in vitro and injected into early Drosophila embryos, as described in Example 4a. Development of injected embryos was assessed by scoring: (a) morphological criteria using a light microscope (Campos-Ortega & Hartenstein (1985) The Embryonic Development of Drosophila melanogaster, Springer-Verlag, Berlin), (b) embryo hatching to become a larvae, (c) puparium formation, and (d) eclosion of the pupae as an adult fly, as indicated in Table 6 herein below. Buffer-injected embryos were injected and monitored in parallel as a control. The percentage of embryos injected with dsRNA that survive to the adult stage is depicted in set forth in Table 6.

[0078] Essential genes were identified as those resulting in a percent viable adults below 38% when disrupted by RNAi. This threshold was determined by comparison to multiple buffer-injected controls.

II. Recombinant Production of Protein and Uses Thereof

[0079] For recombinant production of a protein of the invention in a host organism, a nucleotide sequence encoding the protein is inserted into an expression cassette designed for the chosen host and introduced into the host where it is recombinantly produced. The choice of the specific regulatory sequences such as promoter, signal sequence, 5′ and 3′ untranslated sequence, and enhancer appropriate for the chosen host is within the level of the skill of the routineer in the art. The resultant molecule, containing the individual elements linking in the proper reading frame, is inserted into a vector capable of being transformed into the host cell. Suitable expression vectors and methods for recombinant production of proteins are well known for host organisms such as E. coli, yeast, and insect cells (see, e.g., Lucknow and Summers, Bio/Technol. 6:47 (1988)). Additional suitable expression vectors are baculovirus expression vectors, e.g., those derived from the genome of Autographica californica nuclear polyhedrosis virus (AcMNPV). A preferred baculovirus/insect system is PVL1392(3) used to transfect Spodoptera frugiperda SF9 cells (ATCC) in the presence of linear Autographica californica baculovirus DNA (Phramingen, San Diego, Calif.). The resulting virus is used to infect HighFive Tricoplusia ni cells (Invitrogen, La Jolla, Calif.).

[0080] Recombinantly produced proteins are isolated and purified using a variety of standard techniques. The actual techniques used vary depending upon the host organism used, whether the protein is designed for secretion, and other such factors. Such techniques are well known to the skilled artisan (see, e.g. chapter 16 of Ausubel, F. et al., “Current Protocols in Molecular Biology”, pub. by John Wiley & Sons, Inc. (1994).

IV. Assays for Characterizing the Proteins

[0081] Recombinantly produced proteins are useful for a variety of purposes. For example, they can be used in in vitro assays to screen known insecticidal chemicals whose target has not been identified to determine if they inhibit protein activity. Such in vitro assays may also be used as more general screens to identity chemicals that inhibit such protein activity and that are therefore novel insecticide candidates. Recombinantly produced proteins may also be used to elucidate the complex structure of these molecules and to further characterize their association with known inhibitors in order to rationally design new inhibitory insecticides. Alternatively, the recombinant protein can be used to isolate antibodies or peptides that modulate the activity and are useful in transgenic solutions.

V. In Vivo Inhibitor Assay: Discovery of Small Molecule Ligands that Interact with Proteins of Unknown Function.

[0082] Having identified a protein as a potential insecticide target based on its essentiality for insect viability, a next step is to develop an assay that allows screening large numbers of chemicals to determine which ones interact with the protein. Although it is straightforward to develop assays for proteins of known function, developing assays with proteins of unknown functions can be more difficult.

[0083] To address this issue, novel technologies are used that can detect interactions between a protein and a ligand without knowing the biological function of the protein. A short description of three methods is presented, including fluorescence correlation spectroscopy, surface-enhanced laser desorption/ionization, and biacore technologies. In addition to those descibed here, there are additional methods that are currently being developed that are also amenable to automated, large-scale screening.

[0084] Fluorescence Correlation Spectroscopy (FCS) theory was developed in 1972 but it is only in recent years that the technology to perform FCS became available (Madge et al. (1972) Phys. Rev. Lett., 29: 705-708; Maiti et al. (1997) Proc. Natl. Acad. Sci. USA, 94: 11753-11757). FCS measures the average diffusion rate of a fluorescent molecule within a small sample volume. The sample size can be as low as 10³ fluorescent molecules and the sample volume as low as the cytoplasm of a single bacterium. The diffusion rate is a function of the mass of the molecule and decreases as the mass increases. FCS can therefore be applied to protein-ligand interaction analysis by measuring the change in mass and therefore in diffusion rate of a molecule upon binding. In a typical experiment, the target to be analyzed is expressed as a recombinant protein with a sequence tag, such as a poly-histidine sequence, inserted at the N- or C-terminus. The expression takes place in E. coli, yeast or insect cells. The protein is purified by chromatography. For example, the poly-histidine tag can be used to bind the expressed protein to a metal chelate column such as Ni2+ chelated on iminodiacetic acid agarose. The protein is then labeled with a fluorescent tag such as carboxytetramethylrhodamine or BODIPY® (Molecular Probes, Eugene, Oreg.). The protein is then exposed in solution to the potential ligand, and its diffusion rate is determined by FCS using instrumentation available from Carl Zeiss, Inc. (Thornwood, N.Y.). Ligand binding is determined by changes in the diffusion rate of the protein.

[0085] Surface-Enhanced Laser Desorption/Ionization (SELDI) was invented by Hutchens and Yip during the late 1980's (Hutchens and Yip (1993) Rapid Commun. Mass Spectrom. 7: 576-580). When coupled to a time-of-flight mass spectrometer (TOF), SELDI provides means to rapidly analyze molecules retained on a chip. It can be applied to ligand-protein interaction analysis by covalently binding the target protein on the chip and analyze by MS the small molecules that bind to this protein (Worrall et al. (1998) Anal. Biochem. 70: 750-756). In a typical experiment, the target to be analyzed is expressed as described for FCS. The purified protein is then used in the assay without further preparation. It is bound to the SELDI chip either by utilizing the poly-histidine tag or by other interaction such as ion exchange or hydrophobic interaction. The chip thus prepared is then exposed to the potential ligand via, for example, a delivery system able to pipet the ligands in a sequential manner (autosampler). The chip is then submitted to washes of increasing stringency, for example a series of washes with buffer solutions containing an increasing ionic strength. After each wash, the bound material is analyzed by submitting the chip to SELDI-TOF. Ligands that specifically bind the target will be identified by the stringency of the wash needed to elute them.

[0086] Biacore relies on changes in the refractive index at the surface layer upon binding of a ligand to a protein immobilized on the layer. In this system, a collection of small ligands is injected sequentially in a 2-5 microlitre cell with the immobilized protein. Binding is detected by surface plasmon resonance (SPR) by recording laser light refracting from the surface. In general, the refractive index change for a given change of mass concentration at the surface layer is practically the same for all proteins and peptides, allowing a single method to be applicable for any protein (Liedberg et al. (1983) Sensors Actuators 4: 299-304; Malmquist (1993) Nature 361: 186-187). In a typical experiment, the target to be analyzed is expressed as described for FCS. The purified protein is then used in the assay without further preparation. It is bound to the Biacore chip either by utilizing the poly-histidine tag or by other interaction such as ion exchange or hydrophobic interaction. The chip thus prepared is then exposed to the potential ligand via the delivery system incorporated in the instruments sold by Biacore (Uppsala, Sweden) to pipet the ligands in a sequential manner (autosampler). The SPR signal on the chip is recorded and changes in the refractive index indicate an interaction between the immobilized target and the ligand. Analysis of the signal kinetics on rate and off rate allows the discrimination between non-specific and specific interaction.

[0087] The compounds that are active in the methods disclosed herein may be used to combat agricultural pests such as aphids, locusts, spider mites, and boll weavils as well as such insect pests which attack stored grains and against immature stages of insects living on plant tissue. The compounds are also useful as a nematodicide for the control of agriculturally important soil nematodes and plant parasites.

VI. Production of Peptides

[0088] Phage particles displaying diverse peptide libraries permits rapid library construction, affinity selection, amplification and selection of ligands directed against an essential protein (H. B. Lowman, Annu. Rev. Biophys. Biomol. Struct. 26, 401-424 (1997)). Structural analysis of these selectants can provide new information about ligand-target molecule interactions and then in the process also provide a novel molecule that can enable the development of new insecticides based upon these peptides as leads.

[0089] The invention will be further described by reference to the following detailed examples. These examples are provided for purposes of illustration only, and are not intended to be limiting unless otherwise specified.

### EXAMPLES

[0090] Standard recombinant DNA and molecular cloning techniques used here are well known in the art and are described by Sambrook, et al., Molecular Cloning, eds., Cold Spring Harbor Laboratory Press, Cold Spring Harbor, N.Y. (1989) and by T. J. Silhavy, M. L. Berman, and L. W. Enquist, Experiments with Gene Fusions, Cold Spring Harbor Laboratory, Cold Spring Harbor, N.Y. (1984) and by Ausubel, F. M. et al., Current Protocols in Molecular Biology, pub. by Greene Publishing Assoc. and Wiley-Interscience (1987). Well known Drosophila molecular genetics techniques can be found, for example, in Robert, D. B., Drosophila, A Practical Approach (IRL Press, Washington, D.C., 1986).

### Example 1

### Identification of Lethal Lines

[0091] Essential nucleotide sequences are identified through the isolation of lethal mutants defective in development The genetic scheme for mobilization of P-lacW is as performed in Deak et. al, Genetics 147: 1697-1722 (1997). Additional lethal lines are identified and disclosed in Braun, A., B. Lemaitre, et al., Genetics 147: 623-634 (1997); Galloni, M. and B. A. Edgar, Development 126: 2365-2375 (1999); Gateff, E., Int. J. Dev. Biol. 38(4): 565-590 (1994); Mechler, B. M. J. Biosci., Bangalore 19(5): 537-556 (1994); Roch, F., F. Serras, et al., Mol. Gen. Genet. 257: 103-112 (1998); Russell, M. A., L. Ostafichuk, et al., Genome 41: 7-13 (1998); and in Torok, T., G. Tick et al. Genetics 135: 71-80 (1993), Schaefer et al., Aug. 8, 1999 Personal communication to FlyBase. Furthermore, the BDGP gene disruption project of single P-element insertions reveals lethal lines mutating 25% of vital Drosophila genes Spradling, A. C., D. Stern, et al., Genetics 153: 135-177 (1999).

[0092] Males carrying the transposase source P(Δ2-3) are crossed en masse to yellow white females homozygous for a P-lacW insertion on the X chromosome. Males carrying the PlacW insertion on the X and Δ2-3 on the third chromosome are collected from this cross. The F0 “jumpstart” males are crossed in groups of 10-15 to 20-25 females of w spl; Sb/TM3, Ser genetype. Male F1 progeny with pigmented eyes indicate that the P-lacW has jumped to an autosome. An average of 10-15 males from each F0 cross lacking Δ2-3 are crossed individually to y w, DTS4/TM3, Sb Ser females, that all third chromosomal insertions result in balanced F2 stocks. Insertions on other autosomes yield white-eyed flies in the F2 generation and are eliminated. The balanced third chromosome insertions are tested for lethality in the next generation by placing four to six pairs of y w; P-lacW/TM3, Sb Ser flies in a vial and examining their progeny for the presence of homozygous P-lacW flies. To analyze the lethal phase, the TM3, Sb Ser balancer is replaced by the TM6C, TB Sb chromosome. In such a genetic background, homozygous mutants can be identified by their wild-type body-length. An average of 10-15 pairs of flies are placed in vials supplemented with yeast paste, and the eggs are collected from each line for 1 day. The development of 50-100 progeny is monitored, and the presence of homozygotes are recorded in all developmental stages. Lethal phase is assigned to a developmental stage in which homozygote animals last appear. Lethal lines are identified and maintained.

TABLE 3
P-element location

| | | Inverse | |
|---|---|---|---|
| seq ID | p-element line | PCR | df cross |
| 14 | l(1)G0335 | 516M3h-f09 | Df(2L)Dwee[wo5] |
| 16 | l(3)064301 | 979H5h-b01 | Previously verified |
| 18 | l(3)092416 | 1022H5h- | Previously verified |
| | | c03 | |
| 20 | l(1)G0384 | 449M3h-b09 | Df(1)JC70/Dp(1; Y)dx[+]5, y[+]/C(1)M5 |
| 22 | l(1)G0449 | 267M3h-d07 | Df(1)JC70/Dp(1; Y)dx[+]5, y[+]/C(1)M5 |
| 24 | l(3)s126215 | 1082H5h- | GN50(63E; 64B) |
| | | f05 | |
| 26 | l(1)G0435 | 661m3h | C(1; Y)1, Df(1)g, y[1] f[1] B[1]/C(1)A, y[1]/Dp(1; f)LJ9, y[+] g[+] na[+] Ste[+] |
| 28 | l(3)079101 | 798H5h-e01 | df 084D04-06; 085B06 |
| 32 | l(3)s147104 | 1108H5h- | 6-7(82D; 82F)by62(85D; 85F) |
| | | h06 | |
| 34 | l(3)047418 | 957H5h-a05 | Previously verified |
| 36 | l(1)G0425 | 619M5h-b- | Dp(1; Y)619, y[+] B[S]/w[1] otd[9]/C(1)DX, y[1] w[1] f[1] |
| | | e10 | |
| 38 | l(3)122404 | 1079H5h- | Previously verified |
| | | f02 | |
| 40 | l(1)G0105 | 360H5hA | Df(1)svr, N[spl-1] ras[2] fw[1]/Dp(1; Y)y[2]67g19.1/C(1)DX, y[1] f[1] |
| 44 | l(3)057809 | 971M5h-e06 | Previously Verified |
| 46 | l(1)G0127 | 373M3h-f03 | Previously Verified |
| 48 | l(1)G0469 | 629H3h-f | C(1; Y)1, Df(1)g, y[1] f[1] B[1]/C(1)A, y[1]/Dp(1; f)LJ9, y[+] g[+] na[+] Ste[+] |
| 50 | l(3)S070103 | 788M5h-h03 | 091F01-02; 092D03-06 BL#3012 |
| 54 | l(3)S104104 | 1057M5h- | Previously Verified |
| | | g08 | |
| 56 | l(3)s090609 | 1017H5h- | emc5(61C; 62A) |
| | | a03 | |
| 58 | l(3)093909 | 1026H5h- | Previously Verified |
| | | a11 | |
| 60 | l(1)G0095 | 354M3h-e10 | Df(1)GE202/Y; Dp(1; 2)sn[+]72d/Dp(?; 2)bw[D], bw[D] |
| 62 | l(1)G0031 | 577M3h-h06 | BL3219 C(1; Y)1, Df(1)g, y[1] f[1] B[1]/C(1)A, y[1]/Dp(1; f)LJ9, y[+] g[+] |
| | | | na[+] Ste[+] |
| 64 | l(1)G0354 | 524M3h-g04 | BL1319 Tp(1; 2)w-ec, ec[64d] cm[1] ct[6] sn[3]/C(1)DX, y[1] w[1] f[1] |
| 66 | l(1)G0062 | 333H5h-b02 | Df(1)R20, y[1?]/C(1)DX, y[1] w[1] f[1]/Dp(1; Y)y[+]mal[+] |
| 74 | l(2)k00237 | AQ034169 | BL3219 C(1; Y)1, Df(1)g, y[1] f[1] B[1]/C(1)A, y[1]/Dp(1; f)LJ9, y[+] g[+] |
| | | | na[+] Ste[+] |
| 76 | l(1)G0181 | 492H3h-f | BL936 Df(1)64c18, g[1] sd[1]/Dp(1; 2; Y)w[+]/C(1)DX, y[1] w[1] f[1] |
| 78 | l(3)078514 | 797H5h-d12 | def. 087D01-02; 088E05-06 |
| 80 | l(3)s112110 | 1069H5h- | ry506(88B; 88D) |
| | | e04 | |
| 82 | l(3)024120 | 930H5h-e06 | Previously verified |
| 84 | l(1)G0150 | 442M3h-b02 | Df(1)R20, y[1?]/C(1)DX, y[1] w[1] f[1]/Dp(1; Y)y[+]mal[+] |
| 88 | l(3)054211 | 968H5h-a09 | Previously verified |
| 90 | l(1)G0399 | 659m3h | BL 901Df(1)svr, N[spl-1] ras[2] fw[1]/Dp(1; Y)y[2]67g19.1/C(1)DX, y[1] f[1] |
| 92 | l(1)G0399 | 659m3h | BL 901Df(1)svr, N[spl-1] ras[2] fw[1]/Dp(1; Y)y[2]67g19.1/C(1)DX, y[1] f[1] |
| 94 | l(3)S104002 | 1061H5h- | W4(75B; 75C)by62(85D; 85F) |
| | | d08 | |
| 96 | l(3)S133705 | 1092M5h- | Previously verified |
| | | f09 | |
| 98 | l(3)041706 | 949H5h-g10 | Previously verified |
| 100 | l(1)G0251 | 392M3h-f11 | Df(1)64c18, g[1] sd[1]/Dp(1; 2; Y)w[+]/C(1)DX, y[1] w[1] f[1] |
| 102 | l(3)100409 | 1050H5h- | crb87-5(95F; 96A) |
| | | c09 | |
| 104 | l(1)G0491 | 643M5h-b- | BL3219 C(1; Y)1, Df(1)g, y[1] f[1] B[1]/C(1)A, y[1]/Dp(1; f)LJ9, y[+] g[+] |
| | | g11 | na[+] Ste[+] |
| 108 | l(1)G0306 | 603m3h | BL1879 Df(1)GE202/Y; Dp(1; 2)sn[+]72d/Dp(?; 2)bw[D], bw[D] |
| 112 | l(1)G0344 | 609H5hA | BL3219 C(1; Y)1, Df(1)g, y[1] f[1] B[1]/C(1)A, y[1]/Dp(1; f)LJ9, y[+] g[+] |
| | | | na[+] Ste[+] |
| 116 | l(3)s083705 | 1006H5h- | 2-2(81F; 82F) |
| | | h07 | |
| 118 | l(1)G0044 | 319M3h-c02 | Df(1)svr, N[spl-1] ras[2] fw[1]/Dp(1; Y)y[2]67g19.1/C(1)DX, y[1] f[1] |
| 120 | l(1)G0012 | 300M5h-b- | Df(1)svr, N[spl-1] ras[2] fw[1]/Dp(1; Y)y[2]67g19.1/C(1)DX, y[1] f[1] |
| | | e08 | |
| 122 | l(1)G0012 | 300M5h-b- | Df(1)svr, N[spl-1] ras[2] fw[1]/Dp(1; Y)y[2]67g19.1/C(1)DX, y[1] f[1] |
| | | e08 | |
| 124 | l(1)G0431 | 566H3h-f | BL 901 Df(1)svr, N[spl-1] ras[2] fw[1]/Dp(1; Y)y[2]67g19.1/C(1)DX, y[1] f[1] |
| 126 | l(1)G0130 | 376H3h-f- | Df(1)svr, N[spl-1] ras[2] fw[1]/Dp(1; Y)y[2]67g19.1/C(1)DX, y[1] f[1] |
| | | e10 | |
| 128 | l(1)G0010 | 576M3h-c07 | BL5279 Df(1)JC70/Dp(1; Y)dx[+]5, y[+]/C(1)M5 |
| 130 | l(3)s118602 | 1076H5h- | ZP1(66A; 66C)G28(66B; 66C)ry506(88B; 88D)red1(88B; 88D) |
| | | e11 | |
| 132 | l(1)G0285 | 508H3h-f- | BL3033 Df(1)R20, y[1?]/C(1)DX, y[1] w[1] f[1]/Dp(1; Y)y[+]mal[+] |
| | | e03 | |
| 134 | l(3)s137212 | 1094H5h- | GN50(63E; 64B) |
| | | g05 | |
| 136 | P{GawB}c338 | F49 (13m3h | |
| 138 | l(1)G0334 | 515M3h-g09 | BL5279 Df(1)JC70/Dp(1; Y)dx[+]5, y[+]/C(1)M5 |
| 140 | l(1)G0464 | 627M3h-d | BL5292 (008C-D; 009B + 001A01; 001B02) |
| 142 | l(3)099013 | 1044H5h- | Previously Verified |
| | | c04 | |
| 144 | l(3)144912 | 1103H5h- | Previously verified |
| | | h01 | |
| 146 | l(1)G0345 | 471M3h-d03 | BL5279 Df(1)JC70/Dp(1; Y)dx[+]5, y[+]/C(1)M5 |
| 148 | l(1)G0453 | 663M3h-d03 | BL5292 y[1] nej[Q7] v[1] f[1]/Dp(1; Y)FF1, y[+]/C(1)DX, y[1] w[1] f[1] |
| 150 | l(1)G038 | 616H5hB | BL 929 Df(1)v-L15, y[1]/C(1)DX, y[1] w[1] f[1]; Dp(1; 2)v[+]75d/+ |
| 152 | l(1)G0492 | 666M3h-d06 | Previously verified |
| 154 | l(1)G0052 | 325M5h-b- | Df(1)v-N48, f[*]/Dp(1; Y)y[+]v[+]#3/C(1)DX, y[1] f[1] |
| | | f01 | |
| 156 | l(1)G0269 | 653M5h-b | BL3033 Df(1)R20, y[1?]/C(1)DX, y[1] w[1] f[1]/Dp(1; Y)y[+]mal[+] |
| 158 | l(1)G0241 | 422H3h-f- | Dp(1; Y)BSC1, y[+]/w[67c23] P{lacW]l(1)G0060[G0060]/C(1)RM, y[1] v[1] |
| | | d02 | |
| 162 | l(1)G0141 | 277M5h-b- | Dp(1; Y)BSC1, y[+]/w[67c23] P{lacW]l(1)G0060[G0060]/C(1)RM, y[1] v[1] |
| | | b08 | |
| 164 | l(1)G0250 | 468H5h-e02 | BL5292 y[1] nej[Q7] v[1] f[1]/Dp(1; Y)FF1, y[+]/C(1)DX, y[1] w[1] f[1] |
| 166 | l(3)sS030003 | 943H5h-e09 | M-Kx1(86C; 87B)T-61(86E; 87A)T32(86E; 87C) |
| 168 | l(1)G0428 | 456M3h-c04 | BL1538 Df(1)os[UE69]/C(1)DX, y[1] f[1]/Dp(1; Y)W39, y[+] ! = fcl[+]Y |
| 170 | l(3)072603 | 996H5h-h02 | previously verified |
| 172 | l(3)S094310 | 1029H5h- | previously verified |
| | | c08 | |
| 174 | l(1)G0220 | 467M3h-d02 | M19 BL1527 Df(1)svr, N[spl-1] ras[2] fw[1]/Dp(1; Y)y[2]67g19.1/C(1)DX, |
| | | | y[1] f[1] |
| 176 | l(3)090417 | 811H5h-e11 | def. 087D01-02; 088E05-06 |
| 178 | l(3)s2172 | AQ034107 | gasfilling screen |
| 180 | l(1)G0025 | 310M3h-d09 | Df(1)JC70/Dp(1; Y)dx[+]5, y[+]/C(1)M5 |
| 182 | l(1)G0076 | 343M34-d11 | Previously verified |
| 184 | l(1)G0151 | 482M3h-g04 | BL1527 Df(1)svr, N[spl-1] ras[2] fw[1]/Dp(1; Y)y[2]67g19.1/C(1)DX, y[1] f[1] |
| 186 | l(3)S069605 | 990M5h-f06 | previously verified |
| 188 | l(1)G0221 | 434H3h-f- | Df(1)19, f[1]/C(1)RM, y[1] shi[1] f[1]; Dp(1; Y)shi[+]3, y[+] |
| | | f02 | |
| 190 | l(1)G0075 | 342M3h-d12 | Df(1)v-N48, f[*]/DP(1; Y)y[+]#3/C(1)DX, y[1] f[1] |
| 192 | l(3)s002001 | 886H5h-c09 | R-G5(62A; 62D)R-G7(62B; 62F) |
| 196 | l(1)G0046 | 321M3h-c04 | Df(1)64c18, g[1] sd[1]/Dp(1; 2; Y)w[+]/C(1)DX, y[1] w[1] f[1] |
| 198 | l(1)G0020 | 303M5h-b- | Dp(1; Y)619, y[+] B[S]/w[1] otd[9]/C(1)DX, y[1] w[1]f[1] |
| | | f06 | |
| 200 | l(3)s095214 | 1032H5h- | faf-BP(100D; 100F) |
| | | b05 | |
| 202 | l(1)G0481 | 275H5bB | Dp(1; Y)619, y[+] B[S]/w[1] otd[9]/C(1)DX, y[1] w[1] f[1] |
| 206 | l(3)s119608 | 1077H5h- | B81(99C; 100F) |
| | | e12 | |
| 208 | l(1)G0172 | 650H3h-f- | BL5292 y[1] nej[Q7] v[1] f[1]/DP(1; Y)FF1, y[+]/C(1)DX, y[1] w[1] f[1] |
| | | c12 | |
| 210 | l(1)G0429 | 564M3h-b11 | BL5459 C(1; Y)6, y[1] w[*] P{white-un4}BE1305 mew[023]/C(1)RM, Y[1] |
| | | | pn[1] v[1]; Dp(1; f)y[+] |
| 212 | l(3)005028 | 892H5h-a04 | Previously verified |
| 216 | l(1)G0343 | 520M5h-b | BL5594 Df(1)dhd81, w[1118]/C(1)DX, y[1] f[1]; Dp(1; 2)4FRDup/+ |
| 218 | l(1)G0343 | 520M5h-b | BL5594 Df(1)dhd81, w[1118]/C(1)DX, y[1] f[1]; Dp(1; 2)4FRDup/+ |
| 220 | l(1)G0174 | 463M3h-c10 | Df(1)dhd81, w[1118]/C(1)DX, y[1] f[1]; Dp(1; 2)4FRDup/+ |
| 224 | l(1)G0132 | 377H3h-f- | Df(1)svr, N[spl-1] ras[2] fw[1]/DP(1; Y)y[2]67g19.1/C(1)DX, y[1] f[1] |
| | | f10 | |
| 226 | l(1)G0144 | 387M3h-f06 | Df(1)64c18, g[1] sd[1]/Dp(1; 2; Y)w[+]/C(1)DX, y[1] w[1] f[1] |
| 228 | l(1)G0144 | 387M3h-f06 | Df(1)64c18, g[1] sd[1]/Dp(1; 2; Y)w[+]/C(1)DX, y[1] w[1] f[1] |
| 230 | l(1)G0312 | 291M5h-b- | Df(1)64c18, g[1] sd[1]/Dp(1; 2; Y)w[+]/C(1)DX, y[1] w[1] f[1] |
| | | g08 | |
| 232 | l(3)S044402 | 954M5h-b06 | Previously Verified |
| 234 | l(1)G0375 | 534M5h-b- | BL936 Df(1)64c18, g[1] sd[1]/Dp(1; 2; Y)w[+]/C(1)DX, y[1] w[1] f[1] |
| | | h03 | |
| 236 | l(1)G0159 | 486M3h-d09 | BL5279 Df(1)JC70/Dp(1; Y)dx[+]5, y[+]/C(1)M5 |
| 238 | l(1)G0227 | 651H3h-f | BL5279 Df(1)JC70/Dp(1; Y)dx[+]5, y[+]/C(1)M5 |
| 240 | l(1)G0212 | 433M3h-a06 | Df(1)19, f[1]/C(1)RM, y[1] shi[1] f[1]; Dp(1; Y)shi[+]3, y[+] |
| 242 | l(1)G0296 | 383H5hA | Df(1)svr, N[spl-1] ras[2] fw[1]/Dp(1; Y)y[2]67g19.1/C(1)DX, y[1]0 f[1] |
| 244 | l(3)j2B9 | AQ026304 | gasfilling screen |
| 248 | l(1)G0007 | 298M3h-a08 | Previously verified |
| 250 | l(3)070006 | 991H5h-b08 | Previously verified |
| 252 | l(1)G0423 | 454M3h-c02 | Df(1)svr, N[spl-1] ras[2] fw[1]/Dp(1; Y)y[2]67g19.1/C(1)DX, y[1] f[1] |
| 254 | l(1)G0361 | 527H3h-f | BL556 Dp(1; Y)BSC1, y[+]/w[67c23] P{lacW]l(1)G0060[G0060]/C(1)RM, |
| | | | y[1] v[1] |
| 256 | l(1)G0290 | 285H5hA | Df(1)JC70/Dp(1; Y)dx[+]5, y[+]/C(1)M5 |
| 258 | l(1)G0436 | 570M3h-c03 | BL 929 Df(1)v-L15, y[1]/C(1)DX, y[1] w[1] f[1]; Dp(1; 2)v[+]75d/+ |
| 260 | l(1)G0111 | 362M5hA | Dp(1; Y)BSC1, y[+]/w[67c23] P{lacW]1(1)G0060[G0060]/C(1)RM, y[1] v[1] |
| 262 | l(1)G0183 | 264H3h-f- | Df(1)svr, N[spl-1] ras[2] fw[1]/Dp(1; Y)y[2]67g19.1/C(1)DX, y[1] f[1] |
| | | e07 | |
| 264 | l(3)S100209 | 1049H5h- | Previously verified |
| | | d08 | |
| 266 | l(3)S100209 | 1049H5h- | Previously verified |
| | | d08 | |
| 268 | l(1)G0438 | 572M3h-c05 | BL5270 Df(1)19, f[1]/C(1)RM, y[1] shi[1] f[1]; Dp(1; Y)shi[+]3, y[+] |
| 270 | l(1)G0116 | 366M5h-b- | Df(1)19, f[1]/C(1)RM, y[1] shi[1] f[1]; Dp(1; Y) shi[+]3, y[+] |
| | | f09 | |
| 272 | l(3)S025007 | 934M5h-g05 | Previously verified |
| 274 | l(1)G0419 | 561M3h-b09 | BL 929 Df(1)v-L15, y[1]/C(1)DX, y[1] w[1] f[1]; Dp(1; 2)v[+]75d/+ |
| 276 | l(3)S008418 | 900H5h-a05 | Previously verified |
| 278 | l(3)141110 | 1098H5h- | Previously verified |
| | | g08 | |
| 280 | l(3)S148011 | 1110H5h- | P115(89B; 89E)C4(89E; 90A) |
| | | g08 | |
| 282 | l(3)S023204 | 923M5h-f05 | Previously verified |
| 284 | l(3)S096404 | 1037H5h- | Previously verified |
| | | a08 | |
| 286 | l(3)145511 | 1104H5h- | Previously verified |
| | | h02 | |
| 292 | l(3)S110013 | 1066H5h- | Previously verified |
| | | h08 | |
| 294 | l(3)010605 | 904H5h-d11 | Previously verified |
| 296 | l(3)100604 | 1051H5h- | Previously verified |
| | | c10 | |
| 302 | l(3)001604 | 883H5h-c06 | Previously verified |
| 304 | l(1)G0358 | 526M3h-g06 | BL1538 Df(1)os[UE69]/C(1)DX, y[1] f[1]/Dp(1; Y)W39, y[+] ! = fcl[+]Y |
| 306 | l(3)067006 | 984H5h-g07 | Previously Verified |
| 308 | l(1)G0070 | 338M3h-d08 | Df(1)os[UE69]/C(1)DX, y[1] f[1]/Dp(1; Y)W39, y[+] ! = fcl[+]Y |
| 310 | l(3)02240 | G00700 | Df(3L)AC1 |
| 312 | l(3)088205 | 1013H5h- | Previously Verified |
| | | c01 | |
| 314 | l(3)S042228 | 951H5h-f01 | vin2(67F; 68D)vin5(68A; 69A) |
| 316 | l(3)S050407 | 964H5h-a07 | M-Kx1(86C; 87B)T-61(86E; 87A)T32(86E; 87C) |
| 318 | l(3)011046 | 908H5h-d09 | Previously verified |
| 320 | l(3)S094204 | 1028H5h- | ea(88E; 89A) |
| | | b01 | |
| 322 | l(3)001917 | 738H5h-a03 | def. 089E01-F04; 091B01-B02 |
| 324 | l(3)131602 | 858H5h-h10 | def. 089E01-F04; 091B01-B02 |
| 326 | l(1)G0451 | 624M3h-a10 | BL 901 Df(1)svr, N[spl-1] ras[2] fw[1]/Dp(1; Y)y[2]67g19.1/C(1)DX, y[1] f[1] |
| 328 | l(3)S022231 | 920H5h-g04 | Previously verified |
| 330 | l(3)S085401 | 225M3d | Df(3L-Xs-533/TM6B Sb[1]Ser[1] (76B4-77B) |
| 332 | l(3)075515 | 794H5h-d09 | def. 076B04; 077B |
| 334 | l(3)131602 | 858H5h-h10 | def. 089E01-F04; 091B01-B02 |
| 336 | l(3)058302 | 972H5h-a11 | Previously verified |
| 338 | l(3)058302 | 972H5h-a11 | Previously verified |
| 340 | l(3)S005916 | 895H5h-d01 | lxd6(67F; 68D)P14(90C; 91A) |
| 342 | l(3)025616 | 752H5h-b02 | def. 087D01-02; 088E05-06 |
| 348 | l(3)S089302 | 1014H5h- | AC1(67A; 67D) |
| | | a01 | |
| 354 | l(2)06444 | AQ025653 | In(2R)vg[W] |
| 356 | l(3)026115 | 938H5h-e07 | Previousyl verified |
| 358 | l(1)G0461 | 626M3h-a12 | BL5279 Df(1)JC70/Dp(1; Y)dx[+]5, y[+]/C(1)M5 |
| 360 | l(2)04329 | G00564 | Df(2R)vg135 Df(2R)CX1 |
| 362 | l(3)113105 | 1070H5h- | Previously verified |
| | | e05 | |
| 364 | l(1)G0213 | 495M5h-b | BL1537 Dp(1; Y)W73, y[31d] B[1], f[+], B[S]/C(1)DX, y[1] f[1]/y[1] |
| | | | baz[EH171] |
| 366 | l(3)003606 | 888H5h-d06 | Previously verified |
| 368 | l(3)S005042 | 893H5h-c01 | eN19(93B; 94)eR1(93B; 93D) |
| 372 | l(3)S075101 | 1002H5h- | pXT103(85A; 85C) |
| | | h04 | |
| 374 | l(1)G0455 | 269H5h-a01 | BL5678 duplication |
| 376 | l(1)G0260 | 432M3h-a05 | Df(1)19, f[1]/C(1)RM, y[1] shi[1] f[1]; Dp(1; Y)shi[+]3, y[+] |
| 378 | l(3)S086909 | 806H5h-b04 | 087D01-02; 088E05-06 BL1534 |
| 380 | l(1)G0272 | 435H3h-f- | M26 BL5270 Df(1)19, f[1]/C(1)RM, y[1] shi[1] f[1]; Dp(1; Y)shi[+]3, y[+] |
| | | g02 | |

### Example 2

### Sequence Determination

[0093] Inverse PCR: To determine the flanking sequence of the lethal lines, the “Inverse PCR and Cycle Sequencing Protocol for Recovery of Sequences Flanking PZ, PlacW; and PEP elements” of E. Jay Rehm, Berkeley Drosophila Genome Project on the world wide web at fruitfly.org/methods/ is used with slight modifications. These modifications include the following: genomic DNA is obtained from 10 flies, rather than 30 flies, with adjustments for final concentrations; all DNA precipitations are performed using glycogen; for some reactions, the digest volume is used in the appropriate ligations; the number of cycles in PCR reactions was increased to 40; Pry1 and Pry2 were used to sequence the PEP line flanking sequences.

[0094] Genomic DNA isolation: Flies are collected and frozen at −20° C. until ready for use. Genomic DNA is prepared by grinding flies in 200 μl Buffer A with a disposable grinder 30× (Buffer A is composed of 100 mM Tris-Cl, pH7.5, 100 mM EDTA, 100 mM NaCl, 0.5% SDS). Add 200 μl additional Buffer A; grind another 15×. Keep on ice until finished. Incubate at 65° C. for 30 minutes. Vortex to mix. Add 800 μl freshly made LiCl/KAc Solution (LiCl/Kac Solution is comprised of 1 part 5 M KAc and 2.5 parts 6 M LiCl). Vortex. Incubate −20° C. for 20 minutes. Spin at maximum speed at room temperature 15+ minutes. Transfer 1 ml supernatant to a clean tube avoiding floating debris. Add 600 μl room temperature isopropanol to supernatant. Mix well by tipping. Add 0.5 μl glycogen. Vortex. Incubate at room temperature for 5 minutes. Spin 15 minutes at room temperature, maximum speed. Aspirate away the supernatant Wash 2× with 500 μl 70% room temperature ethanol; vortex between washes. Spin for 10 minutes at room temperature, maximum speed. Aspirate away supernatant. Dry in a speed vacuum for 10 minutes. Resuspend in 50 μl TE+0.1 mg/ml RNAse A {for 1 ml TE/RNAse A Solution, add 990 μl TE+10 μl RNAse A (10 mg/ml)). Check 5 μl on 0.8% gel.

[0095] Digest Genomic DNA (Sau3A I, HinP1I, or Msp I—done separately): Set up digests in 96 well tray. Per reaction, add 10 μl genomic DNA, 5 μl 10× Buffer, 2 μl 0.1 mg/ml RNAase A stock, 30.5 μl dH₂O, 10 units of enzyme (8 units for Sau 3AI), 0.5 μl of 100×BSA (for Sau 3AI only). Incubate at 37° C. for 2.5 hours. Check on 0.8% gel before heat-inactivating at 65° C. for 20 minutes.

[0096] Ligate P Element and Flanking DNA: Set-up ligation tube with 400 μl of ligation mixture then add 30-50 μl of the digest: Per reaction, add 30 μl of digested genomic DNA, 43 μl of 10× ligation buffer (NEB), 375 μl of dH₂O, and 2 μl of ligase (2 Weiss units). Incubate overnight at 4° C. Total reaction volume is adjusted as appropriate.

[0097] Precipitate Ligated DNA: To ligation tube, add 40 μl 3M NaAc pH5.2+1 ml 100% room temperature ethanol+1 μl glycogen. Mix by tipping. Incubate −20° C. for 15+ minutes. Spin 15 minutes, 4° C. Aspirate away supernatant Wash with 500 μl room temperature 70% ethanol. Vortex. Spin room at temperature for 10 minutes. Aspirate away supernatant. Dry in speed vacuum for 10 minutes. Resuspend in 50μl TE. Vortex to mix. Transfer to 96 well plate.

[0098] PCR: Set up PCR reactions in 96 well plates (Applied Biosystems). Set up PCR reactions with primers appropriate for the type of P element and the end of the element from which genomic sequence is to be recovered.

[0099] Primers for PCR: (type of P element 5′ or 3′ end forward primer reverse primer annealing temperature):

| | |
|---|---|
| PZ P-element5′ endPlac4Plac1 | 60° |
| PZ P-element3′ endPry4Pry1 | 55° |
| PZ P-element3′ endPry2Pry1 | 60° |
| PlacW P-element5′ endPlac4Plac1 | 60° |
| PlacW P-element3′ endPry4Plw3-1 | 55° |
| PlacW P-element3′ endPry2Pry1 | 60° |
| PEP P-element5′ endPwht1Plac1 | 60° |
| PEP P-element3′ endPry4Pry1 | 55° |
| PEP P-element3′ endPry2Pry1 | 60° |

[0100] The Pry2/Pry1 combination has a higher annealing temperature than the Pry4/Pry1 and Pry4/Plw3-1 combinations, but the resulting PCR products do not allow sequencing directly off the 3′ end of the P-element. The latter primer combinations are therefore used in all initial experiments; the Pry2/Pry1 combination can be used in those cases where strong and unique bands do not result.

[0101] Per reaction: 10 μl of ligated genomic DNA, 1 μl of 10 mM dNT mix, 1 μl of 10 μM forward primer stock, 1 μl of 10 μl reverse primer stock, 5 μl of 10× Qiagen Taq buffer, 31.5 μl of dH₂O, 0.5 μl of Qiagen Taq.

[0102] Cycles: 1×95° C. for 5 minutes; 40×(95° C. for 30 seconds; 60° C. (high temp) or 55° C. (low temp) for 30 seconds; 68° C. for 2 minutes); 1×72° C. for 10 minutes; hold at 4° C.; run 10 μl on 1.5% gel to check. Rearray positive wells to 96 well plate for sequencing clean-up. The primer sets for PCR are as shown in the table below:

TABLE 4
PCR Primers

| Digest, End, Temperature | Forward PCR Primer | Reverse PCR Primer |
|---|---|---|
| H5h | Plac4 | Plac1 |
| H3h | Pry2 | Pry1 |
| H3l | Pry4 | Plw3-1 |
| M5h | Plac4 | Plac1 |
| M3h | Pry2 | Pry1 |
| M3l | Pry4 | Plw3-1 |
| S5h | Plac4 | Plac1 |
| S3h | Pry2 | Pry1 |
| S3l | Pry4 | Plw3-1 |

[0103] PCR Primer Sequences (5′ to 3′):

| | |
|---|---|
| Plac4 (27) | |
| -act gtg cgt tag gtc ctg ttc att gtt | SEQ ID NO:1 |
| Plac1 (24) | |
| -cac cca agg ctc tgc tcc cac aat | SEQ ID NO:2 |
| Pry4 (23) | |
| -caa tca tat cgc tgt ctc act ca | SEQ ID NO:3 |
| Pry1 (26) | |
| -cct tag cat gtc cgt ggg gtt tga at | SEQ ID NO:4 |
| Pry2 (28) | |
| -ctt gcc gac ggg acc acc tta tgt tat t | SEQ ID NO:5 |
| Plw3-1 (19) | |
| -tgt cgg cgt cat caa ctc c | SEQ ID NO:6 |
| Pwht1 (19) | |
| -gta acg cta atc act ccg aac agg tca ca | SEQ ID NO:7 |

[0104] Enzymatic Clean-Up for Sequencing: To 40 μl PCR reaction, add 4 μl of enzyme mix. Incubate at 37° C. for 1 hour. Inactivate at 70° C. for 10 minutes. (Enzyme Mix consists of 2.5 U/μl Exonuclease I (Amersham E700732), 0.5 U/μl Shrimp Alkaline Phosphatase (Amersham E70183), 1× Amplitaq PCR buffer, add dH₂O to final volume.)

### Example 3

### Sequence Analysis

[0105] Sequence of the flanking sequence generated by inverse PCR is performed on an ABI 3700 sequencer (Perkin Elmer) using BIG DYE sequencing reaction.

[0106] Primer sets for sequencing are as shown in the table below:

TABLE 5
PCR Primers for Flanking Sequences

| Digest, End, Temperature | Forward Primer | Reverse Primer |
|---|---|---|
| H5h | Splac2 | Sp1 |
| H3h | Pry2 | Sp5 |
| H3l | Spep1 | Sp5 |
| M5h | Splac2 | Sp1 |
| M3h | Pry2 | Sp5 |
| M3l | Spep1 | Sp5 |
| S5h | Splac2 | Sp1 |
| S3h | Pry2 | Sp6 |
| S3l | Spep1 | Sp6 |

[0107] The following primer sets are designed to sequence both ends of PCR products recovered from PlacW and PZ strains:

[0108] Splac2 and Sp1—for use with the Plac4/Plac1 5′ PCR primer combination with either PZ or PlacW P-elements; allows sequencing of both ends of the PCR fragment.

[0109] Spep1 and Sp3—for use with the Pry4/Pry1 3′ PCR primer combination with PZ P-elements; allows sequencing of both ends of the PCR fragment.

[0110] Spep1 and Sp6—for use with the Pry4/Plw3-1 3′ PCR primer combination with PlacW P-elements where Sau3a digestion is performed; allows sequencing of both ends of the PCR fragment.

[0111] Spep1 and Sp5—for use with the Pry4/Plw3-1 3′ PCR primer combination where HinP1 digestion is performed; allows sequencing of both ends of the PCR fragment.

[0112] Pry1 and Pry2—for use with the Pry1/Pry2 3′ PCR primer combination; allows sequencing of both ends of the PCR fragment.

[0113] The PCR products recovered from PEP strains are sequenced with the following primers: Sp1—for use with the Pwht1/Plac1 5′ PCR primer combination with the PEP element; Spep1—for use with the Pry4/Pry1 3′ PCR primer combination with the PEP element; Pry1 and Pry2 for use with the Pry1/Pry2 3′ PCR primer combination with the PEP element.

[0114] Primer Sequences (5′ to 3′):

| | |
|---|---|
| Splac2 (25) | |
| -gaa ttc act ggc cgt cgt ttt aca a | SEQ ID NO:8 |
| Sp1 (22) | |
| -aca caa cct ttc ctc tca aca a | SEQ ID NO:9 |
| Sp3 (24) | |
| -gag tac gca aag ctt taa cta tgt | SEQ ID NO:10 |
| Sp6 (23) | |
| -tga cca cat cca aac atc ctc tt | SEQ ID NO:11 |
| Sp5 (25) | |
| -gca tca caa aaa tcg acg ctc aag t | SEQ ID NO:12 |
| Spep1 (19) | |
| -gac act cag aat act att c | SEQ ID NO:13 |

[0115] Melting temperatures of sequencing primers:
[0116] Splac2—60.1° C.
[0117] Sp1—50.6° C.
[0118] Sp3—49.3° C.
[0119] Sp6—54.9° C.
[0120] Sp5—60.3° C.
[0121] Spep1—44.8° C.

### Example 4

### Secondary Confirmation of Lethality

[0122] The lethality of the chromosome carrying the P-element insertion is demonstrated genetically as described in Example 1. The essential Drosophila nucleotide sequences are identified by isolating nucleotide sequences flanking the P-element insertion and aligning those sequences with genomic Drosophila sequence obtained from the Celera Drosophila database. However, in some instances, a second site mutation exists on the chromosome that is responsible for the lethality. In other instances, the location of the flanking sequence is such that determination of which gene(s) are affected by the P-element insertion is rendered difficult or impossible. Thus, to provide secondary confirmation that the gene indicated is essential, there are many methods that one skilled in the art can use, e.g., rescue of the lethality using transformation technology, perturbation of the gene in a targeted manner, or failure to complement a deficiency.

[0123] To provide secondary confirmation, lethal lines are crossed to a line containing a deficiency. This creates a hemizygous condition in that particular region and reveals the recessive phenotype of the P-element. Complementation with deficiencies that unequivocally remove the P-element insertion site is taken as proof that the P-element does not cause the associated phenotype. Failure to complement indicates that the strain is verified. This method is as performed in Spradling, A. C., D. Stern, et al., Genetics 153: 135-177 (1999). If the insert is present on the X chromosome, which is present in two copies in females but only one copy in males, then the recessive phenotype of the P-element insert is revealed by this hemizygous condition in males. A rescue cross is performed to a stock containing a duplication spanning the region of the insert on the X chromosome on one of the autosomes. If the males survive then the presence of an essential gene disrupted by the P-element but rescued by the duplication is confirmed. While lines with secondary mutations closely linked to the P insertion might be erroneously verified by these procedures, further molecular and genetic analyses suggest that the frequency of such errors is small. RNA interference, described in Fire, A., S. Xu, et al., Nature 391, 806-811 (1998) and Kennerdell, J. R. and Carthew, R. W., Cell 95, 1017-1026 (1998), is used as a method to target a gene of interest and demonstrate that the perturbation of the identified gene produces a lethal phenotype.

### Example 4

### Double-Stranded RNA Interference

[0124] Preparation of dsRNA for Injection. Sequences to be expressed as dsRNA were cloned into Bluescript KS(+) (Stratagene of La Jolla, Calif.), linearized with the appropriate restriction enzymes, and transcribed in vitro with the Ambion T3 and T7 Megascript kits following the manufacturer's instructions (Ambion Inc. of Austin, Tex.). Transcripts were annealed in injection buffer (0.1 mM NaPO₄ pH 7.8, 5mM KCl) after heating to 85° C. and cooling to room temperature over a 1- to 24 hr period. All annealed transcripts were analyzed on agarose gels with DNA markers to confirm the size of the annealed RNA and quantitated as described previously (Fire et al. (1998) Nature 391(6669):806-811). Injected RNA was not gel-purified. Injection of 0.1 nl of a 0.1- to 1.0-mg/ml solution of a 1-kb dsRNA corresponds to roughly 10⁷ molecules/injection.

[0125] Injection of Drosophila melanogaster Embryos. Fly cages were set up using 2- to 4day flies. Agar-grape juice plates were replaced every hour to synchronize the egg collection for 1-2 days. The eggs were collected over a 30-to 60-min period for subsequent injection. The eggs were washed into a nylon mesh basket with tap water. The chorion was removed by brief soaking in a dilute bleach solution. Eggs were positioned on a glass slide such that each egg was in a same orientation. Double-stranded RNA was injected into middle of each egg using an Eppendorf transjector (Eppendorf Scientific, Inc. of Westbury, N.Y.). Following injection, slides were stored in a moist chamber to prevent dessication of the embryos. Embryos were monitored for development and transferred as first intar larvae to vials containing Drosophila medium. Methods for rearing Drosophila staging and common genetic techniques can be found, for example, in Roberts (1986) Drosophila melanogaster, A Practical Approach, IRL Press, Washington, D.C.; Ashburner (1989a) Drosophila: A Laboratory Handbook, Cold Spring Harbor Laboratory Press, New York, N.Y.; Ashburner (1989b) Drosophila: A Laboratory Manual, Cold Spring Harbor Laboratory Press, New York, N.Y.; Goldstein & Fyrberg, eds (1994) in Methods in Cell Biology. Vol. 44, Academic Press, San Diego, Calif.

[0126] The data in Table 6 demonstrates the lethal effect of disrupting the production of protein from the message of the specified gene through RNAi. Based on data from postitve and negative controls, a reduction in survival (% viable adults from developed eggs) below 38% represents a significant lethal effect. Many genes show a complete loss of survivability (with 0% viable). Others show a range of phenotypic penetrance, which is most likely due to the variability of the RNAi technique, but are still considered lethals because they are significantly below controls.

TABLE 6
Data for dsRNA Interference

| | | | # eggs | | | | % viable |
|---|---|---|---|---|---|---|---|
| | | | showing | | | | adults from |
| | Inventor's | # eggs | morphological | # hatched | | | developed |
| seq ID | reference | Injected | development | larvae | # pupae | # adults | eggs |
| | none, buffer only | 941 | 806 | 580 | 500 | 433 | 53.72 |
| 14 | GIN00231, CT28483 | 163 | 148 | 107 | 28 | 26 | 17.57 |
| 30 | GIN00961, CT31117 | 472 | 386 | 170 | 8 | 1 | 0.26 |
| 42 | GIN01243, CT36241 | 107 | 99 | 81 | 9 | 7 | 7.07 |
| 52 | GIN01682, CT1465 | 140 | 127 | 87 | 23 | 15 | 11.81 |
| 68 | GIN01885, CT13424 | 170 | 154 | 78 | 17 | 8 | 5.19 |
| 70 | GIN01896, CT14932 | 164 | 140 | 78 | 44 | 38 | 27.14 |
| 72 | GIN01977, CT23511 | 79 | 70 | 18 | 17 | 15 | 21.43 |
| 86 | GIN02340, CT28931 | 190 | 159 | 0 | 0 | 0 | 0.00 |
| 106 | GIN03775, CT33819 | 172 | 148 | 16 | 0 | 0 | 0.00 |
| 110 | GIN03797, CT33841 | 136 | 127 | 12 | 0 | 0 | 0.00 |
| 114 | GIN04053, CT3509 | 168 | 145 | 106 | 1 | 1 | 0.69 |
| 160 | GIN05757, CT4810 | 159 | 144 | 109 | 37 | 32 | 22.22 |
| 194 | GIN07111, CT6007 | 159 | 140 | 94 | 0 | 0 | 0.00 |
| 204 | GIN07278, CT6738 | 174 | 166 | 7 | 3 | 1 | 0.60 |
| 214 | GIN07446, CT9021 | 125 | 119 | 1 | 0 | 0 | 0.00 |
| 222 | GIN07609, CT6171 | 372 | 316 | 119 | 0 | 0 | 0.00 |
| 246 | GIN08205, CT12517 | 717 | 569 | 433 | 26 | 25 | 4.39 |
| 274 | GIN08858, CT14874 | 177 | 161 | 13 | 3 | 3 | 1.86 |
| 288 | GIN09788, CT17938 | 100 | 83 | 71 | 5 | 2 | 2.41 |
| 290 | GIN09819, CT17971 | 181 | 142 | 107 | 7 | 1 | 0.70 |
| 298 | GIN10338, CT19788 | 170 | 137 | 88 | 5 | 1 | 0.73 |
| 300 | GIN10364, CT19850 | 58 | 55 | 47 | 14 | 6 | 10.91 |
| 344 | GIN11831, CT24122 | 103 | 87 | 0 | 0 | 0 | 0.00 |
| 346 | GIN11918, CT24346 | 469 | 408 | 301 | 257 | 88 | 21.57 |
| 350 | GIN11993, CT24437 | 145 | 130 | 93 | 0 | 0 | 0.00 |
| 352 | GIN12074, CT18257 | 104 | 93 | 80 | 3 | 3 | 3.23 |
| 354 | GIN12174, CT24731 | 168 | 145 | 122 | 1 | 1 | 0.69 |
| 360 | GIN12437, CT25274 | 473 | 424 | 334 | 237 | 63 | 14.86 |
| 370 | GIN13270, CT27543 | 101 | 92 | 78 | 2 | 2 | 2.17 |

### Example 5

### Isolation of Full Length cDNA

[0127] A cDNA screen is performed using a Drosophila melanogaster cDNA library probed with a portion of each nucleotide sequence disclosed in the Sequence Listing. Positive colonies are selected, a subset sequenced, and a clone corresponding to the full-length cDNA is recovered. Alternatively, primers from the predicted 5′ and 3′ end are used in polymerase chain reaction with either a Drosophila cDNA library or first strand cDNAs obtained by reverse transcription of Drosophila mRNAs as template to amplify a fragment representing the full-length clone.

### Example 6

### Expression of Recombinant Protein in Insect Cells

[0128] Baculovirus vectors, which are derived from the genome of AcNPV virus, are designed to provide high levels of expression of cDNA in the SF9 line of insect cells (ATCC CRL#1711). Recombinant baculovirus expressing the cDNA of the present invention is produced by the following standard methods (InVitrogen MaxBac Manual): cDNA constructs are ligated into the polyhedrin gene in a variety of baclovirus transfer vectors, including the pAC360 and the BleAc vector (InVitrogen). Recombinant baculoviruses are generated by homologous recombination following co-transfection of the baculovirus transfer vector and linearized AcNPV genomic DNA (Kitts, P. A., Nucleic Acid Res. 18: 5667 (1990)) into SF9 cells. Recombinant pAC360 viruses are identified by the absence of inclusion bodies in infected cells and recombinant pBlueBac viruses are identified on the basis of B-galactosidase expression (Summers, M. D. and Smith, G. E., Texas Agriculture Exp. Station Bulletin No. 1555). Following plaque purification, the Drosophila cDNA expression is measured.

[0129] The cDNA encoding the entire open reading frame for the Drosophila cDNA is inserted into the BamHI site of pBlueBacII. Constucts in the positive orientation, which are identified by sequence analysis, are used to transfect SF9 cells in the presence of linear AcNPV wild type DNA. Authentic, active Drosophila cDNA is found in the cytoplasm of infected cells. Active Drosophila cDNA is extracted from infected cells by hypotonic or detergent lysis.

### Example 7

### Expression of Recombinant Protein in E. coli

[0130] A cDNA clone of the present invention is subcloned into an appropriate expression vector and transformed into E. coli using the manufacturer's conditions. Specific examples include plasmids such as pBluescript (Stratagene, La Jolla, Calif.), pFLAG (International Biotechnologies, Inc., New Haven, Conn.), and pTrcHis (Invitrogen, La Jolla, Calif.). E. coli is cultured, and expression of the recombinant protein is confirmed. Recombinant protein is then isolated using standard techniques.

### Example 8

### In Vitro Binding Assays

[0131] Recombinant protein is obtained, for example according to Example 6 or Example 7. The protein is immobilized on chips appropriate for ligand binding assays. The protein immobilized on the chip is exposed to sample compound in solution according to methods well know in the art. While the sample compound is in contact with the immobilized protein measurements capable of detecting protein-ligand interactions are conducted. Examples of such measurements are SEDLI, biacore and FCS, described above. Compounds found to bind the protein are readily discovered in this fashion and are subjected to further characterization.

[0132] The above disclosed embodiments are illustrative. This disclosure of the invention will place one skilled in the art in possession of many variations of the invention. All such obvious and foreseeable variations are intended to be encompassed by the appended claims.

[0133] The numerous publications and patents referred to in this document are hereby incorporated by reference, in their entirety.

The application's sequence listing, which the Patent Office published only in electronic form, follows.

SEQUENCE LISTING (381 sequences)

SEQ ID NO: 1 - DNA, 27 bp, artificial sequence
  misc_feature (1)..(27): primer Plac4
actgtgcgttaggtcctgttcattgtt

SEQ ID NO: 2 - DNA, 24 bp, artificial sequence
  misc_feature (1)..(24): Primer Plac1
cacccaaggctctgctcccacaat

SEQ ID NO: 3 - DNA, 23 bp, artificial sequence
  misc_feature (1)..(23): Primer Pry4
caatcatatcgctgtctcactca

SEQ ID NO: 4 - DNA, 26 bp, artificial sequence
  misc_feature (1)..(26): Primer Pry1
ccttagcatgtccgtggggtttgaat

SEQ ID NO: 5 - DNA, 28 bp, artificial sequence
  misc_feature (1)..(28): Primer Pry2
cttgccgacgggaccaccttatgttatt

SEQ ID NO: 6 - DNA, 19 bp, artificial sequence
  misc_feature (1)..(19): Primer Plw3-1
tgtcggcgtcatcaactcc

SEQ ID NO: 7 - DNA, 29 bp, artificial sequence
  misc_feature (1)..(29): Primer Pwht1
gtaacgctaatcactccgaacaggtcaca

SEQ ID NO: 8 - DNA, 25 bp, artificial sequence
  misc_feature (1)..(25): Primer Splac2
gaattcactggccgtcgttttacaa

SEQ ID NO: 9 - DNA, 22 bp, artificial sequence
  misc_feature (1)..(22): Primer Sp1
acacaacctttcctctcaacaa

SEQ ID NO: 10 - DNA, 24 bp, artificial sequence
  misc_feature (1)..(24): Primer Sp3
gagtacgcaaagctttaactatgt

SEQ ID NO: 11 - DNA, 23 bp, artificial sequence
  misc_feature (1)..(23): Primer Sp6
tgaccacatccaaacatcctctt

SEQ ID NO: 12 - DNA, 25 bp, artificial sequence
  misc_feature (1)..(25): Primer Sp5
gcatcacaaaaatcgacgctcaagt

SEQ ID NO: 13 - DNA, 19 bp, artificial sequence
  misc_feature (1)..(19): Primer Spep1
gacactcagaatactattc

SEQ ID NO: 14 - DNA, 6342 bp, Drosophila melanogaster
  CDS (1)..(6342): CT28483
atgaccgcctcggataaatacacgtaccagcggaccgttctctgcctggcccgcgttctggcgggcatccagcccactccctgggataaggtacatgtccacctggccacccactccaccagccacagcgccagcccccctggcaatcgacttttcgcactgaccttgagcggcggccataaaacagacatgcgtgggcgctcagggggcggcggtaaggcagtgcagaccctgttccggtattgtccgcaggagaatgctgccggagtgttttgcctggacacgcgggcccaggatgccgtaattgcgctgggcatttattttctggagggcggctgccagcacgagggccagattgtgccctatctgctgcgtctggccaagtgtctgccgaaggcggtctggattgacgatgcccggagcaacaaagtggaacgcgttcgcattccgtcggcggaaaagttcagcttctgcttgaacaccctgctgtccgacatagcggccaagtgtccggattcgcgcgaggagatcatcctgaatcaggtggaaacgctgagcgcgctggccaacatagtcaagtcgagcagggacagcagctccgcaccgccgcccatcatcctgtgcaaggccacggtgccgctgctcttcggcttggcgcgatcgatgggtcgctatgccagcaacgatccaccgctgctgtgccgcatttttccgcccgagctgctgcccatccagaagggcggcggccgcgacggcaccggctcgagcagcagtgccagcggcacctgcggcggctccttcagcagcagcgaacgcctggcggccacgcatcacttccgacccatcataccgcgctccatgtccggcagtctggcgcaggcccagaacgcaagctacgacgatggaaggcagcggtgcgcgggcggcaagcccagcaagccatcgttgcacagctacttttcggtgccgtacgatccgcggacgcacttcttcacgcgctacggctccagtttcaaccaattcccgaacatgcgcgtctgcgaatcgcccacgaaaggcggcccacgaccactgtatcgtgtgcctccgtttcccatccagcatctacagaccatattcgcggtgtccaagaagctgctcaccaaagacaccctcgaacatctcgacgagcaggcaagcgatatattttcgctgcaccaaatcaagggctattgctacaagagcttctcggaaacgttgaacctggtcctggtgaccctgctcagggaactgctgcagcatcaggttgacctgcccacgccgttcaccaaggatgtgcaggagttcgtcaagcggctctttctcaacggccaaacggagctgcagaataaacagcaggatcaggaacgcgagcggcgcgaggagaacggcatcgcggtggtcaacaagtacaaggtcaatgtgatggccaatgcggcgtgtgtcgatctcctggtttgggccattcgcgacgaaacggaggcggacaagctgtgcggtcgactgtcgcagaaactgaacctggagctcagtcacaagatcgtgatggatcacatgccgctgctgatggtttgcctggagggactgggcaagctggcccacaaatttcccaacattgccggcacctcgatctcgtatctgcgcgacttccttgtggcgcccagtcccattctgggcaagcttcacgaccatgccatgcaatcgctggcccagcagaagaaggagaaggaactaacgcccttcaagatcgcggtccagcactcggactcgcggacggcggtcgtcatctacggggataatcaaaagccgcccggcagcggaaccggtcgcagtggtcatgccgcattcgagtcactgcgcgatgcggccattgagaatctatcgatcgccctgcgcgctgcccacaccctcgatcagttctgtgtgccagctctggtggccaacgtctccaatcgactcttacagccgaaagtctggcagatgataatctcgcagtgtgaaacgcatgtcttcgatgagatcatgaagatgttctcgcgcgtcaccgtgcaatcggcatcgttggcgtacacctcggatccggagcacaggaagcaattccatcacgtctcggatgcggtggtcaatgcattgggcaatattgcggccaacattcaaggggatgccgagatgctggagctgctgggcaagctgctggaactgttcgtccagatcggtttggatggcgagcgcagctacgacaatacaccgggcgcccagaaggccagctcgcgtgctggcaatctgggcatgctgataccggtgattgcggtactggtgcgccgcctgccgccgatcaagaatccccgccagcgactgcacaagctattcaaggacttctgggcctactgtgtcgtaatgggcttcaccaacgcccgcctttggccagcggactggtaccagggtgtgcagcagatagcggccaaatcgccgctactcatctcgcagacagcccacaaatcggatatgcgggagctcaactatacgctggccattaagagcgattcggtgaacgagctgcgtagccagattctggtgcttctcgagcactcctcggacaacgtggcgacggcgatcaataagctctcgtttgcgcagtgcacgtacctgttaagcgtttactggctggagatgctgcgcgtggagaatgcggatgagccgagtctggagccgatcatgagctacctttgcgacacggcgctgcagagggacaagacggggatctggcagtgcgtcaagtgcgttgccgaccaggtcttcgagaagttccgcaatgttctatacgcccacgatgagattcgcgaaaaggtgctggagtcgcaagccacgctgctgctggtctacttcaatcacatccacaaacccatccagatggtggccgatcagtacctctcctttctggtggatcgctttccccacttgctttggaatcgccgcgtgctgtggtgcatgctggacatcctccagctgctggcatactcactcagcctggatcccaacgaggagacgcccacgttgcgtgtagtctcgacgccctacacactgcagctgatggactcgctgccggcgcgagagctgcgcttgaaggacttcgccgatcgttgccagggcattgtgaatgaagccatgaaatgggcgccgcgatccacacgctcgcacctacaggagtatcccaatcagattcccacgcccgtgctggctcaccacagcggattggcgctggcattcgactcggtggtgagcagtagtgcccagcacacgggcaccatgagcaagcggccgagctgtgtcaactccgacacgcccagattcgtatcggttttgtgcctgagaagcaaatacgccggtgagatcagtggcttgctgtccgtacttagcgagaaggataaggccggcttggcggaccgactggtcagcgatgtgtgggaggcgtgtgccgagaagagcgacgcccgccatcgtggcgctctatggcgtgccaccgcctatctgatcatatgctcggagatcagcaggaaactgctgcatgcggtggccagttcgcagctggagctgttcaccgaatcggcgatggagaccgccgttgagtgctggcagtgggtgctgactgcgcgccaggatctggagctgtgcttcatccaggagatggtcagcgcctggcagacgacattcgagaagcgaatgggcttgtttgcgtgggaaacggaggtcacccatccactggccgcctacgaaggctgcaagctggtcagcaagcccatactgatcgcgccccatttgatttggctgcagctgctctccgaaatggtggacacagccaagtattgcaacagggacaaggtggagatgttctgcctcctgttgcaccgatgtcttcccgttctcaagagtagcaaacagaaccgtcaggtgtccaccgttggctgccgcttcaagctgctgcagtgcggtctgtcgctgctgcagggcaacaccattccgaagtcgctctccagaaatatcctccgcgagcggatatactccaacgcactggactacttttgcggaccaccaacgtgccccaatcagagcagggagcagctactggaggacataatgatattgctgaagttctggcagacgatgcgcagtgaaaagaagcatctggtgacgtcggaagtgggtgactatgacttgacaaatgcctccgttagctccacgcaaatgctggccgtgagaaataatccggaaacggcatccctgatcagcggcggtgggctagtcaacgattacacgcgctccatgagtgccagtggcaatgcggtgggcatgggcatgggtgtagcgggcggcggaagcagcagtggctggtacaacaccattccgcactccacatccacactgtcgaagcgatcgaatcgctccaagcggctgcagtatcagaaggattcctacgacaaggactacatgaagaagcgcaatctgatccttgagctgctggccgtcgagctcgagttcctcattacctggtacaatcccaatagtctgccggatcttatagtgccgggcgaggaacagatcacggaatggcgcaaccggccgtacaagtcgaccgtttggcgggactatgcgcgtctcgcctggtgctataacccggcactggctgtcttcctaccgcagcggatcaagaacgcggagatcattgatgaggaggtgtcgcggctggtctgctccgatcccatagcggtgtgccacattcccgaggcgctcaaatacctgtgcaccaccaagaacctgctgcaggagagcccggacctggtgtacatactctcgtggtcgccagtgacgcccatccaggccctggcctacttctcacggcagtatccatcgcatccgctaacagctcagtatgccgtaaagaccctctcctcgtatccggcggaatcggtgctgccgtacatcccgcaactggtccaagcccttcggcacgacaccatgggctatgtggtggagttcattaagaatatatcgcgacggtcgcagatagtggcacaccaattgatctggaacatgcagacgaacatgtacatggacgaggatcaacagcacaaggatcccaatctgtacgaggcactcgatcagctatcgcaaagtattatcgcatcgttctcgggcgctgccaagcggttctacgagcgggaattcgacttcttcggcaagataacggccgtatccggcgaaattcgctcgtttgccaagggcattgagcggaagaacgcatgcctggcggcgcttagcaggatcaaggtgcagggcggctgttatctgccctccaatccggaggccatggtcctcgatatcgactacagcagcggcacgccgatgcaaagtgcggccaaggcgccgtatttggcacgattccgtgtgtatcgttgcggcatcacggagctggagacgcgcgccatggaggtgtccaataatccgaactcccaggaggatgccaagatgacgctgggcgtggagtcgtggcaggcggccattttcaaggtgggcgacgatgtgcgccaggacatgctggcgctccaggtgatcaccatcttcaagaacatcttccagcaggtgggactcgatctgttcctgttcccctaccgcgttgtggccaccgctccaggctgcggcgtcatcgagtgcgtgccgaatgccaagtcgagggatcaactcggccgacagacggacagtggactctccgagtatttccagcatcagtacggcgacgagagctccaaggagttccaggcggcgcgcgccaactttgtcaagtccatggcagcctactcgttgatcggctatctgctccagattaaggatcgccacaatggtaacatcatgatcgacaaggatggccacatcatacacatagattttggctttatgttcgagtcgtcgccaggtggtaatatcggcttcgagccggacatgaagctgaccgacgaaatggtcatgatcatgggcggcaagatggactcgccggccttcaagtggttctgcgagctgtgcgtgcaggccttcctcgccgttcgtccgtatcaggatgcaattgtctcgctggtatccctgatgctggacactggactgccctgcttccgcggccagacgatcaatctgctgaagcagcgcttcgtggccaccaagaacaacaaggaggcggccgcccacatgctggctgtcatccgcaattcgtaccagaacttccgcacgcgtacctacgacatgatccagtactaccagaaccagataccctactaa

SEQ ID NO: 15 - protein, 2113 aa, Drosophila melanogaster
MTASDKYTYQRTVLCLARVLAGIQPTPWDKVHVHLATHSTSHSASPPGNRLFALTLSGGHKTDMRGRSGGGGKAVQTLFRYCPQENAAGVFCLDTRAQDAVIALGIYFLEGGCQHEGQIVPYLLRLAKCLPKAVWIDDARSNKVERVRIPSAEKFSFCLNTLLSDIAAKCPDSREEIILNQVETLSALANIVKSSRDSSSAPPPIILCKATVPLLFGLARSMGRYASNDPPLLCRIFPPELLPIQKGGGRDGTGSSSSASGTCGGSFSSSERLAATHHFRPIIPRSMSGSLAQAQNASYDDGRQRCAGGKPSKPSLHSYFSVPYDPRTHFFTRYGSSFNQFPNMRVCESPTKGGPRPLYRVPPFPIQHLQTIFAVSKKLLTKDTLEHLDEQASDIFSLHQIKGYCYKSFSETLNLVLVTLLRELLQHQVDLPTPFTKDVQEFVKRLFLNGQTELQNKQQDQERERREENGIAVVNKYKVNVMANAACVDLLVWAIRDETEADKLCGRLSQKLNLELSHKIVMDHMPLLMVCLEGLGKLAHKFPNIAGTSISYLRDFLVAPSPILGKLHDHAMQSLAQQKKEKELTPFKIAVQHSDSRTAVVIYGDNQKPPGSGTGRSGHAAFESLRDAAIENLSIALRAAHTLDQFCVPALVANVSNRLLQPKVWQMIISQCETHVFDEIMKMFSRVTVQSASLAYTSDPEHRKQFHHVSDAVVNALGNIAANIQGDAEMLELLGKLLELFVQIGLDGERSYDNTPGAQKASSRAGNLGMLIPVIAVLVRRLPPIKNPRQRLHKLFKDFWAYCVVMGFTNARLWPADWYQGVQQIAAKSPLLISQTAHKSDMRELNYTLAIKSDSVNELRSQILVLLEHSSDNVATAINKLSFAQCTYLLSVYWLEMLRVENADEPSLEPIMSYLCDTALQRDKTGIWQCVKCVADQVFEKFRNVLYAHDEIREKVLESQATLLLVYFNHIHKPIQMVADQYLSFLVDRFPHLLWNRRVLWCMLDILQLLAYSLSLDPNEETPTLRVVSTPYTLQLMDSLPARELRLKDFADRCQGIVNEAMKWAPRSTRSHLQEYPNQIPTPVLAHHSGLALAFDSVVSSSAQHTGTMSKRPSCVNSDTPRFVSVLCLRSKYAGEISGLLSVLSEKDKAGLADRLVSDVWEACAEKSDARHRGALWRATAYLIICSEISRKLLHAVASSQLELFTESAMETAVECWQWVLTARQDLELCFIQEMVSAWQTTFEKRMGLFAWETEVTHPLAAYEGCKLVSKPILIAPHLIWLQLLSEMVDTAKYCNRDKVEMFCLLLHRCLPVLKSSKQNRQVSTVGCRFKLLQCGLSLLQGNTIPKSLSRNILRERIYSNALDYFCGPPTCPNQSREQLLEDIMILLKFWQTMRSEKKHLVTSEVGDYDLTNASVSSTQMLAVRNNPETASLISGGGLVNDYTRSMSASGNAVGMGMGVAGGGSSSGWYNTIPHSTSTLSKRSNRSKRLQYQKDSYDKDYMKKRNLILELLAVELEFLITWYNPNSLPDLIVPGEEQITEWRNRPYKSTVWRDYARLAWCYNPALAVFLPQRIKNAEIIDEEVSRLVCSDPIAVCHIPEALKYLCTTKNLLQESPDLVYILSWSPVTPIQALAYFSRQYPSHPLTAQYAVKTLSSYPAESVLPYIPQLVQALRHDTMGYVVEFIKNISRRSQIVAHQLIWNMQTNMYMDEDQQHKDPNLYEALDQLSQSIIASFSGAAKRFYEREFDFFGKITAVSGEIRSFAKGIERKNACLAALSRIKVQGGCYLPSNPEAMVLDIDYSSGTPMQSAAKAPYLARFRVYRCGITELETRAMEVSNNPNSQEDAKMTLGVESWQAAIFKVGDDVRQDMLALQVITIFKNIFQQVGLDLFLFPYRVVATAPGCGVIECVPNAKSRDQLGRQTDSGLSEYFQHQYGDESSKEFQAARANFVKSMAAYSLIGYLLQIKDRHNGNIMIDKDGHIIHIDFGFMFESSPGGNIGFEPDMKLTDEMVMIMGGKMDSPAFKWFCELCVQAFLAVRPYQDAIVSLVSLMLDTGLPCFRGQTINLLKQRFVATKNNKEAAAHMLAVIRNSYQNFRTRTYDMIQYYQNQIPY

SEQ ID NO: 16 - DNA, 855 bp, Drosophila melanogaster
  CDS (1)..(855): CT28925
atggctcacttcagtggtcatcgccagccggcgacggtgccgtcccatttcaaggatctcttcaccaatggccagttgggtgcggcggaggagagcaacaataatgaccagaacgagcaggagaatcgtcccagtaacaataacaatgctggaccttcggatcccgcctgctgggtcttcggttacggatccttgtgctggcatcctggctttaattacaccaagtgcattacgggatatattcgaggatatgttcgccgcttctggcagggcaacgtcacacatcgcggctgtgaagagaagcctggacgtgttgcaacgctcgttgaggacaaagagggaatcacttggggctgcgcctacagaataacaggcagcacggcactggattatctcaagcagcgggagtgcacactgggtggctatgcaacaatcgataccaagttcttcccgcgcgtcgcctcgcaggacacgcccttcagcggcgaggcggtcgaggtactggtctatgtggcgacgccagagaatatctattggttgggcgatgacccggtcgaggagattgcccagcagatcgtatcctgccgcggtcccagcggacacaatgccgagtacctgttgcgcctggccctgttcatgcacgaggagattcccggcgtgagggacgatcatctgttcgagctggagcaattggttttagaggaactgtaccgccgccaaatacctctgtcatctgtgatgggccgcaatccagataggatacgccgcgactcgcacgaggacatccgccgcccgccatccttcgagttcacctcccgtgtgcccgacaccaagctgcgttgcctgaacatttaa

SEQ ID NO: 17 - protein, 284 aa, Drosophila melanogaster
MAHFSGHRQPATVPSHFKDLFTNGQLGAAEESNNNDQNEQENRPSNNNNAGPSDPACWVFGYGSLCWHPGFNYTKCITGYIRGYVRRFWQGNVTHRGCEEKPGRVATLVEDKEGITWGCAYRITGSTALDYLKQRECTLGGYATIDTKFFPRVASQDTPFSGEAVEVLVYVATPENIYWLGDDPVEEIAQQIVSCRGPSGHNAEYLLRLALFMHEEIPGVRDDHLFELEQLVLEELYRRQIPLSSVMGRNPDRIRRDSHEDIRRPPSFEFTSRVPDTKLRCLNI

SEQ ID NO: 18 - DNA, 1296 bp, Drosophila melanogaster
  CDS (1)..(1296): CT29122
atggtattagacatggctcagactctggaggataagtcaatctgggaggacggggaggagtccctgggcgagaaggtaatgcgtatgtccaccgatgaaattgtgagcaggactcgcctgatggacaacgagatcaagatcatgaagagcgaagtgatacgcataacgcacgagattcaggcgcaaaatgagaagatcaaggacaacaccgaaaagatcaaggtcaacaagacactgccctacctggtgtccaatgtaatagagctgctggatgtggatccacaggaggaggaggacgacggctccgtcaccgttctggacaaccagcgaaagggcaagtgcgccgtcatcaaaacatccactcgacaggcgtatttcctgcccgtcatcggcctggttgatgccgagaaactgaagccaggtgatctggccggagtcaacaaagacttctacttgatcctggaaaccctgcccgcagagtatgatgcccgcgtaaaagccatggaagtggacgagcgacctacagagcaattctccgacattggaggtttggacaagcagatacaggagctcatcgaggcagtggtgctacccatgacgcacaaggagaagttcaaaaaccttggcattcacccacccaaaggtgtcattttgtacggcccccctggaactggcaaaacattgctggcccgtgcctgcgccgctcagacaaagtccaccttcctcaagctggcaggtccccagttggtgcaaatgttcatcggtgatggtgccaagctggtgcgcgatgccttcgccttggccaaggagaaggcgcctgccattatcttcattgacgaattggacgccattggcaccaagcgtttcgattcggagaaggccggtgaccgtgaggtccagcgaactatgttggagcttcttaatcagctaaatggcttcagttccactgcagatattaaggtgattgcggccaccaatcgcgtagacattctccctgctctgctgcgctctggtcgtctggatcgtaagatcgagttcccacatcccaacgaggaagcccgtgcccgtattatgcagattcactcgcgtaaaatgaacgttagcaatgatgtgaatttcgaggaattgtcccgatccacggatgacttcaacggcgcccagtgcaaagccgtttgtgtggaagctggtatgatcgcactgcgtcgctctgccaattcggttacgcacgaagacttcatggacgccatcatggaagtgcaggcgaagaagaaggctaatcttaactactacgcttag

SEQ ID NO: 19 - protein, 431 aa, Drosophila melanogaster
MVLDMAQTLEDKSIWEDGEESLGEKVMRMSTDEIVSRTRLMDNEIKIMKSEVIRITHEIQAQNEKIKDNTEKIKVNKTLPYLVSNVIELLDVDPQEEEDDGSVTVLDNQRKGKCAVIKTSTRQAYFLPVIGLVDAEKLKPGDLAGVNKDFYLILETLPAEYDARVKAMEVDERPTEQFSDIGGLDKQIQELIEAVVLPMTHKEKFKNLGIHPPKGVILYGPPGTGKTLLARACAAQTKSTFLKLAGPQLVQMFIGDGAKLVRDAFALAKEKAPAIIFIDELDAIGTKRFDSEKAGDREVQRTMLELLNQLNGFSSTADIKVIAATNRVDILPALLRSGRLDRKIEFPHPNEEARARIMQIHSRKMNVSNDVNFEELSRSTDDFNGAQCKAVCVEAGMIALRRSANSVTHEDFMDAIMEVQAKKKANLNYYA

SEQ ID NO: 20 - DNA, 1023 bp, Drosophila melanogaster
  CDS (1)..(1023): CT29492
atgaatgaactagacagtctcaggcaggaagccgagtccctaaagaacgccattcgggatgcccggaaggcggcctgcgacacatcactgttgcaagcggccacctcgctggaacccatcggccgcatacagatgcgcacccgtcgtacattacgcggccatttggcgaaaatctacgccatgcattggggcaacgattcaaggaatctcgtatcagcctcacaggacggcaaactgatcgtttgggactcgcataccacgaacaaagtccatgccattccactgcgatcctcgtgggtgatgacctgtgcgtacgccccatccggtagctatgtggcctgcggtggcctcgacaacatgtgttcaatttacaacctaaagacgcgcgagggcaacgtccgggtgtcccgtgagctgcccggccatggtggctatctatcgtgctgccgcttcctggacgacaatcagatcgtgaccagctccggtgatatgtcgtgcggattgtgggatatcgagacgggactgcaggtaacctcgtttttgggccacaccggcgatgtgatggccctctcactggcgccccaatgcaaaacgttcgtatccggcgcctgcgatgcgtccgccaagttatgggacatccgggagggtgtctgtaaacaaaccttccccggccacgaatccgatatcaatgcggtcacatttttcccgaatggtcaggcattcgccaccggttcggacgacgcaacctgtcgattgttcgatatccgtgccgatcaggagttggccatgtattcgcacgacaacatcatatgcggcatcacatcggtggcattctcgaagagcggacgtctgttattagcgggctacgatgatttcaactgcaatgtatgggacacgatgaaggcagaacggtctggcatactcgctggccacgacaaccgtgtatcctgtttgggtgtcaccgagaacggcatggcggtggcaacaggatcgtgggactccttcttgcgtgtatggaactaa

SEQ ID NO: 21 - protein, 340 aa, Drosophila melanogaster
MNELDSLRQEAESLKNAIRDARKAACDTSLLQAATSLEPIGRIQMRTRRTLRGHLAKIYAMHWGNDSRNLVSASQDGKLIVWDSHTTNKVHAIPLRSSWVMTCAYAPSGSYVACGGLDNMCSIYNLKTREGNVRVSRELPGHGGYLSCCRFLDDNQIVTSSGDMSCGLWDIETGLQVTSFLGHTGDVMALSLAPQCKTFVSGACDASAKLWDIREGVCKQTFPGHESDINAVTFFPNGQAFATGSDDATCRLFDIRADQELAMYSHDNIICGITSVAFSKSGRLLLAGYDDFNCNVWDTMKAERSGILAGHDNRVSCLGVTENGMAVATGSWDSFLRVWN

SEQ ID NO: 22 - DNA, 1737 bp, Drosophila melanogaster
  CDS (1)..(1737): CT30008
atgtctccaaaagcgctaaatgtgcgcgtcacgacaatggacgcggaactggagttcgccattcagtcgacgacgacgggcaagcaattgtttgaccaggtggtgaagacgatcggcctgcgagaggtttggttctttggactccagtacaccgactccaagggcgactccacatggatcaagctgtacaaaaaggtgatgaaccaggacgtgaagaaggagaatcccttgcagtttaggttccgtgccaaattctatcccgaggatgtggccgaggagctgatccaggacattacactgcgtctgttctacctgcaggtgaagaatgccatactgaccgacgagatctattgtccgccagagacatccgtgctgctcgcctcgtacgccgtccaggcgcgtcatggtgaccacaataagaccacccacacagccggctttctggccaacgatcgcctgctgccgcagcgcgtcatcgaccagcacaagatgtccaaggacgagtgggagcagtcgattatgacctggtggcaggagcatcgcagcatgctgcgcgaggatgccatgatggagtatctgaagatcgcccaagacctggagatgtacggcgttaactactttgagatccgcaacaagaagggcacggatctttggctgggcgtagacgcactgggtctgaacatttacgagcaggacgataggttgacgccgaaaattggtttcccatggtccgagattcgcaacatttcgttctcggagaagaagttcatcatcaagccgatcgacaagaaggctccggactttatgttctttgcgccacgtgtccgcatcaacaagcgcattctggccctctgcatgggcaaccacgagctgtacatgcgtcgccgcaagccggacaccatcgatgtgcagcagatgaaggcgcaggcgcgcgaggagaagaatgccaaacagcaggaacgtgagaagctgcagctggcgctggccgcacgcgaacgcgctgaaaagaagcaacaggagtacgaggatcggctaaagcagatgcaggaggacatggagcgttcgcagcgcgatctgcttgaggcgcaggacatgatccgccggctggaggagcagctgaagcagctgcaggccgccaaggatgagctggagctgcgccagaaggagctgcaggcgatgctgcagcgcctcgaggaggccaagaatatggaggccgtcgagaagctcaagctcgaggaggagatcatggccaagcagatggaggtgcagcgcattcaggacgaggtcaacgccaaggatgaggagacaaagcgtctgcaggacgaagtggaagacgcccgacgcaagcaggtcattgcggctgaagccgctgccgctctgctggccgcgtcgacaacgccgcagcatcaccacgtggccgaggatgagaacgagaacgaggaggagctgacgaacggcgatgccggtggcgatgtgtcgcgcgacctggacaccgacgagcatatcaaggaccccatcgaggacagacgcacgctggccgagcgcaacgaacgcttgcacgatcagctcaaggctctgaaacaagatttggcgcagtctcgcgacgagacgaaagagacggcaaacgataagattcatcgcgagaacgttcgccagggacgtgacaagtacaagacgctccgcgagattcgtaagggcaacacaaagcgtcgcgtcgatcagtttgagaacatgtaa

SEQ ID NO: 23 - protein, 578 aa, Drosophila melanogaster
MSPKALNVRVTTMDAELEFAIQSTTTGKQLFDQVVKTIGLREVWFFGLQYTDSKGDSTWIKLYKKVMNQDVKKENPLQFRFRAKFYPEDVAEELIQDITLRLFYLQVKNAILTDEIYCPPETSVLLASYAVQARHGDHNKTTHTAGFLANDRLLPQRVIDQHKMSKDEWEQSIMTWWQEHRSMLREDAMMEYLKIAQDLEMYGVNYFEIRNKKGTDLWLGVDALGLNIYEQDDRLTPKIGFPWSEIRNISFSEKKFIIKPIDKKAPDFMFFAPRVRINKRILALCMGNHELYMRRRKPDTIDVQQMKAQAREEKNAKQQEREKLQLALAARERAEKKQQEYEDRLKQMQEDMERSQRDLLEAQDMIRRLEEQLKQLQAAKDELELRQKELQAMLQRLEEAKNMEAVEKLKLEEEIMAKQMEVQRIQDEVNAKDEETKRLQDEVEDARRKQVIAAEAAAALLAASTTPQHHHVAEDENENEEELTNGDAGGDVSRDLDTDEHIKDPIEDRRTLAERNERLHDQLKALKQDLAQSRDETKETANDKIHRENVRQGRDKYKTLREIRKGNTKRRVDQFENM

SEQ ID NO: 24 - DNA, 2676 bp, Drosophila melanogaster
  CDS (1)..(2676): CT30208
atgaattgggctatctatcttttgttggccctgatctcgctgggcagagcaacacctgttcccaatcgccagtatagctgtatgagctaccaggaggacgacaactcatttcacgatgatgatggcgatcaggactctagtggcgagctgcaggagcagcaggtggagtccactccgattccgagcgagccacatagacgcacctgcccagatggctacactttctgtttcaccatctggaaccagacggccaatggagcgcgggttgttaaacagggttgctggaaggacaacacggatcgcacttccatttgcagccagtcggaatgtaccagctcggctcccacctcgaagaccagttctttgtactactgttgctgttcgggaggagtgtgcaatgcccaatattccgtgggacggacttcgatcacaaatcgggcgacagaaaaacagcaccagtcctttttggccagtacaatgctgggccttgccggtggactcacagccctcacaatcggcatcttcctggctgttcaatattgccgcacggccaaggagaagccggaacccgaggagtcgcctctggcgccatcgggccctggctacagttctaatctcaggaatgtcgacaacatgaatttgatcggcatgctggggagcggcaagtatggaactgtgatgaagggactgctccacgatcaggaggtggcggttaagatatatcccgaagagcatcatcagtactatgtgaacgagaggaacatctatgccttgcctttgatggagtgtcctgcgctgttgagctatttcggctacgatgaacgctgtaccatggacgggcgaatggagtatcaactggtactatcactggctcccctcggatgcctccaggattggttgatagccaataccctaactttcagcgaatgctgtggaatgctgcggtccatcacgcgtggaatctcgcacctgcacacggaactccgactgggagatcagcataagccctgtgtggctcatcgggatatcaacacaaggaatgtgttggtccaagctgatctcagctgttgcattgcggactttggtttcgctctcaaggtgtttggctccaagtacgagtacaagggcgaggtggccatggcggaaacgaagagcatcaatgaggtgggcacccttcgctacatggccccagaagtactggaaggagctgtaaatctgcgggattgcgaaacctcgctgaagcaaatggatgtctatgccctgggcctggtgctgtgggaagtggctacccgctgctcggatttctatgcccctggtcaagcaacacctccctacaaagcaccctatgagcaggaggtgggctcccatcccagctttgatcaaatgcaggcgttggtggtgcggcacaaggcgcgtcccttatttcccaccggctggggtggaggagcagcggctaaagtggtgcgggatacttgcgaggactgttgggatcatgatgcggatgctaggctgacctccctgtgtgccgaggagcgcatgcaggagatgtcgactttaaggccacgagcacaggctcaaccttccagtccactgctgaataccaacaatctggtggccagtccaactgcagaacagggaataaatatcatagccacaacgacaacggcggctgcagttcatcaccagatgagctccgacactacgggacttatacagccacctcccaatcagcagatacctctagctgccttggaacgggagaagaatcatctgagctacccgcaacagcaattacagccgtatcagggcaggaatccctgtcaggagcgcaatctggcacctctgacaatgcgaactccaccggttcttgtggagcggagcaagaagcacagtttccagacacagcctcaggagaactcactgtcttgcttggagcatgatgtgtgtgtggaggagctgatagccagccatcagcaccagcagcaaaagaacacgattgtaagcacaggtggaaatggcaattcctgcttgggtcagggatttcccaagcagcagaacacggatcaaaaactccggggatggcatggagtaagagcccttatccacaagaaacttttccgcaaggagcacgccgaggagctgtgtcgtcagttgcagttgggcgaagagaagtccaatctggtgacggctctacgtcgaccgaacaacctggatcttagtcctcgcctcgataaacctccgccggatcagctgaggagtgcagagcaacggatgggaactccggctcacattgtaccccgctcgctgtccagcagcctgatcaagcacatcaacgggaccaccaacaataactccatccagagtcatggtagcgaattgcagaccctcacccgtccggcttcgaagcgaagaccaggtcacctgcgcaccaactccctgatggccaccacgggtcagggtccgccgacggagcaacaaatgcgtcgtcagcacagtctggaggtattccgtgaggtattcagcggtcgggggagcagcgagcgtttgagggaccccagcgagcgggtcaagacgccgggagatgtgccaccatccgtacggaaagccagggccagcaagacactgagcttgtacgacgatcggatgatggactcctccctgctcaacattctctag

SEQ ID NO: 25 - protein, 891 aa, Drosophila melanogaster
MNWAIYLLLALISLGRATPVPNRQYSCMSYQEDDNSFHDDDGDQDSSGELQEQQVESTPIPSEPHRRTCPDGYTFCFTIWNQTANGARVVKQGCWKDNTDRTSICSQSECTSSAPTSKTSSLYYCCCSGGVCNAQYSVGRTSITNRATEKQHQSFLASTMLGLAGGLTALTIGIFLAVQYCRTAKEKPEPEESPLAPSGPGYSSNLRNVDNMNLIGMLGSGKYGTVMKGLLHDQEVAVKIYPEEHHQYYVNERNIYALPLMECPALLSYFGYDERCTMDGRMEYQLVLSLAPLGCLQDWLIANTLTFSECCGMLRSITRGISHLHTELRLGDQHKPCVAHRDINTRNVLVQADLSCCIADFGFALKVFGSKYEYKGEVAMAETKSINEVGTLRYMAPEVLEGAVNLRDCETSLKQMDVYALGLVLWEVATRCSDFYAPGQATPPYKAPYEQEVGSHPSFDQMQALVVRHKARPLFPTGWGGGAAAKVVRDTCEDCWDHDADARLTSLCAEERMQEMSTLRPRAQAQPSSPLLNTNNLVASPTAEQGINIIATTTTAAAVHHQMSSDTTGLIQPPPNQQIPLAALEREKNHLSYPQQQLQPYQGRNPCQERNLAPLTMRTPPVLVERSKKHSFQTQPQENSLSCLEHDVCVEELIASHQHQQQKNTIVSTGGNGNSCLGQGFPKQQNTDQKLRGWHGVRALIHKKLFRKEHAEELCRQLQLGEEKSNLVTALRRPNNLDLSPRLDKPPPDQLRSAEQRMGTPAHIVPRSLSSSLIKHINGTTNNNSIQSHGSELQTLTRPASKRRPGHLRTNSLMATTGQGPPTEQQMRRQHSLEVFREVFSGRGSSERLRDPSERVKTPGDVPPSVRKARASKTLSLYDDRMMDSSLLNIL

SEQ ID NO: 26 - DNA, 783 bp, Drosophila melanogaster
  CDS (1)..(783): CT30807
atgtcggaagttgaatcgcagcagagccaggagacgaacggcagcagtaaattcgatgtgcccgagatagaattgatcataaaggcctcgaccatcgacggcaggcggaagggcgcctgtttgttctgccaggagtacttcatggacctatatctactggccgaactgaagacgatcagcctgaaggtgacgacggtggatatgcagaagccgccgcccgatttccgtaccaattttgaggccacacacccgcccatcctcattgacaatgggctggccattttggagaacgaaaagatcgagcggcacatcatgaagaacataccgggcggctacaatctgtttgtccaggacaaggaggtggccaccctgatcgagaacctgtatgtcaagttgaagctgatgctggtaaagaaggacgaggccaagaacaacgccctgctctcgcatctgcgcaagatcaacgatcatctgtccgcgcgcaacacgcgcttcctcaccggcgacaccatgtgctgcttcgactgtgagctgatgccgcgcctgcagcacatccgtgtggcgggcaagtactttgtcgactttgaaatcccgacgcacttgacggccctgtggcgctacatgtatcacatgtaccagctggacgccttcacacaatcgtgcccggccgaccaggacattatcaatcactacaagctgcaacagagtctcaaaatgaagaagcacgaggagctggagacgcccacgtttaccacatacattccaattgatatttcggagtaa

SEQ ID NO: 27 - protein, 260 aa, Drosophila melanogaster
MSEVESQQSQETNGSSKFDVPEIELIIKASTIDGRRKGACLFCQEYFMDLYLLAELKTISLKVTTVDMQKPPPDFRTNFEATHPPILIDNGLAILENEKIERHIMKNIPGGYNLFVQDKEVATLIENLYVKLKLMLVKKDEAKNNALLSHLRKINDHLSARNTRFLTGDTMCCFDCELMPRLQHIRVAGKYFVDFEIPTHLTALWRYMYHMYQLDAFTQSCPADQDIINHYKLQQSLKMKKHEELETPTFTTYIPIDISE

SEQ ID NO: 28 - DNA, 4107 bp, Drosophila melanogaster
  CDS (1)..(4107): CT30887
atgtccaccgccgttgaaacggggtcgtcgcctgccaagagcaatagcaacaacagtagcagtggcggcaacaacaacaacggcaacggcaatctcagtccaaatgcaaaaggcgtgcagcggcgtcaactgcgcgagaggaagcagcgcaagctctacctggaggaatggtcgctgggcgacgaggatggcgaggggacgcggggattcagcgttgccgagaagctcgaatcttcaaagttcgcgcaggcgggaatggtgcgcgagatgcgcggatgcgatctcaccgtagctttcctccaacagcacggctttaacatcccgctgttattccgggacaaagcgggcttaggtttacgaatgcccgatccgcaggagttcaccgtgaacgatgtgcgactgtgcgtgggatccaggcgactcctcgatgtcatggacgtgaacacgcagaagaacctgcagatgaccatgaaggagtggcagcagtactatgacagtccgcagaaagaccgtctgctaaacgtgatctctctggagttctcgcacacccgcctggacagattcgttcagagtccggagatcgtgcgccagatcgactgggtggatgtggtctggcccaagcagcttaaggacgcccagcgggagggcaccaatctgctaggcggcatgatgtacccaaaggtgcagaaatactgcctgatgtcagtgaagaactgctacacggattttcacattgacttcggtgggacttccgtttggtatcacatcttaagaggaagcaaagtattttggctaattccacccacggaccgtaatctgcagttgtatgaaaagtgggttctctctggcaaacaggcagacattttcttcggagatacagtggagaaatgtgccagggtttatttaaccgcggggaacaccttcttcatacccaccggctggatacacgcagtctacacgcccacccaatccctcgtctttggaggaaatttcctgcactccttcgggatagtgaagcaacttaaaaccgccagtgttgaggatagcacgaaagtgccgcagaagttccgatatcccttcttcacggagatgctgtggtacgttcttgctcgctatgttcacacgctactgggccactcacatctggaaggtgaggcctcgttgagcgaggatgaaatggctgcccgtccgcatacccatcttacgcaccacgagctctttggactgaaggagatcgttatgtatttgtacgatctgccgccgcagaagaaaaatgtgcccagcctggttctggatcctgtggccctgatcaaagacgtccgatcgttggtcgagcgtcactgcaaggatcagcaagatctcgcgattactggcgtgtcagtgttaaagtcgccaccaggatcgcagccccccttcttgttgtatgatcgcacacgcgtgaaacaggagataaagcaggaaattgcacgcaagaatgcagaggtaatacgggaacaacagcaattggaggcgggcagggccagggaggccgaatcggatacatctcaatccactggagtgggatcagtcatcggaatgggggccggagtcgagtacagtaacggagttatgaagaaggagcaattggagaacggtagcggagtaacagttggcgggcacggatcacagccagaggccacctttgccctgcccaccgatacgcttaagtatcgcccacccaagaaaatgcatttggccacggcgttggtggcagccgctgcaagcagcagctctggaggaggcggaccagttgcaggagtgggaggatccgcggtggtgggaagcagccatagtcctaccggcggaggagtgggcccagtcacaggagcaggcggtgctattagtgtgattgccaccagctccagctacattgaaggaggacaagttggaggaattctcaacatggacaattgtcattctccagaagggggtggcgctaaactgtctccaaatcttaccggtactggacaaccaagacgtcgcaggacgcgctgcaagaactgtgccgcctgccagcgctccgactgcggcacctgtcccttctgtatggatatggttaagtttggtggacctggtcgggccaagcaaacgtgcatgatgcgacaatgtctatcgccaatgctgccggttacagcgcagtgtgtttactgtcatctggatgggtggcgtcagacaccagtctctccgcagaccaagcaactggcttccgccgatgggccctccgctctaatggagtgttccgtgtgctacgagatcgcccacccggactgtgctctctcgcagttagatggcacagaggatgcggcggacgccaagggaatcgtaaatgaagatctgccaaacagttgggagtgtcccagctgctgccgctctggcaaaaactatgactataaggtacgattaccatcaacacatgtttctttagtcttagtgcaacttactaatccaacctttattgtacagcctcgccattttcgagcacggcaaaagtcctccgaagtgcgtcgcgtttctgtttcccatggtcaaggaggcgccgaaggccacgcggatggaaatacattgctgccgcccccggtgggccagtataatgactttgtcttcaccagtgagtcggaaatggaatcgggtactgtcagtggccacatgacacattggaaacacggaatgaagcgccaccatcagctggaggttaaaacggagcgaaataatagctgcgacaccccatctcccggcatttcaccaaatgccattggcggcgactccaaagtaggaaagcggcgtaagagcgacgacggaacgagcgttagtagcagcatgcacgagagtaatgacgccccatgtggctcttcggcggagggagcaggtggagcgggaaatgcaaatgtatccactaatcagtggagtggcagtggcggcggaggtggttcccgcaagaagaactcaatacgatcacagctggcccagcaaatgctgaactcgtcgacccgagtcctcaagaaaccccaatatgtcgtgcggccagcaagtggaaccggttcgtcttcgtccagtggaaatggaggtagcgcatccgccaccaacggaatcagcaatggcagcaatcaaagcggtgcaaactcctgtggagctggcaacggcgagcgaggaaccaataacggaggattgagcggctcaaacggcttgggcaatcagcattacagttcatcacaaaatctggcgttggacccaactgtgctgaagatcatatttcgttaccttccgcaggacacgctggttacctgttgctcagtatgtaaggtatggtcgaacgcagcggtcgatcccgatttgtggaagaaaatgaattgctcggagcacaagatgtcagcatcacttttgacagcgattgtgcgcaggcagccggagcatcttattttggactggacgcagattgccaagaggcagttggcgtggctggtggctcgcctcccggcgctcaagaatctctcgctgcaaaactgtcccatccaggcagtgttggcactgcacacctgcctttgtccaccgcttcaaactctggatctcagctttgtgagaggattgaacgatgctgcaataagggacatcctttcacctccaaaggattcgcgacctggcttaagtgactcgaagacgcgtctaagggatcttaaagtaatgaagctggccggaacagatatctccgatgtggctgtgcgctatatcacgcagtcgttaccgtatctgcggcatctggatctctcctcctgccaacgaatcacggatgcgggcgtggcacaaataggaacctccaccacagccaccgctcgtctcacggagcttaatctgagcgcctgcaggcttgtgtctgagaacgctctggagcacctggccaagtgcgaaggtctcatctggctggacctgcgccatgtgccccaggtcagcacccagtcggtgattcgctttgcaagcaactccaagcatgatctttgcgtcagagacatcaagctggtagagcgaaggcggaggaactcgacgacagcaaaccgaagctggcaccacgactaa

SEQ ID NO: 29 - protein, 1368 aa, Drosophila melanogaster
MSTAVETGSSPAKSNSNNSSSGGNNNNGNGNLSPNAKGVQRRQLRERKQRKLYLEEWSLGDEDGEGTRGFSVAEKLESSKFAQAGMVREMRGCDLTVAFLQQHGFNIPLLFRDKAGLGLRMPDPQEFTVNDVRLCVGSRRLLDVMDVNTQKNLQMTMKEWQQYYDSPQKDRLLNVISLEFSHTRLDRFVQSPEIVRQIDWVDVVWPKQLKDAQREGTNLLGGMMYPKVQKYCLMSVKNCYTDFHIDFGGTSVWYHILRGSKVFWLIPPTDRNLQLYEKWVLSGKQADIFFGDTVEKCARVYLTAGNTFFIPTGWIHAVYTPTQSLVFGGNFLHSFGIVKQLKTASVEDSTKVPQKFRYPFFTEMLWYVLARYVHTLLGHSHLEGEASLSEDEMAARPHTHLTHHELFGLKEIVMYLYDLPPQKKNVPSLVLDPVALIKDVRSLVERHCKDQQDLAITGVSVLKSPPGSQPPFLLYDRTRVKQEIKQEIARKNAEVIREQQQLEAGRAREAESDTSQSTGVGSVIGMGAGVEYSNGVMKKEQLENGSGVTVGGHGSQPEATFALPTDTLKYRPPKKMHLATALVAAAASSSSGGGGPVAGVGGSAVVGSSHSPTGGGVGPVTGAGGAISVIATSSSYIEGGQVGGILNMDNCHSPEGGGAKLSPNLTGTGQPRRRRTRCKNCAACQRSDCGTCPFCMDMVKFGGPGRAKQTCMMRQCLSPMLPVTAQCVYCHLDGWRQTPVSPQTKQLASADGPSALMECSVCYEIAHPDCALSQLDGTEDAADAKGIVNEDLPNSWECPSCCRSGKNYDYKVRLPSTHVSLVLVQLTNPTFIVQPRHFRARQKSSEVRRVSVSHGQGGAEGHADGNTLLPPPVGQYNDFVFTSESEMESGTVSGHMTHWKHGMKRHHQLEVKTERNNSCDTPSPGISPNAIGGDSKVGKRRKSDDGTSVSSSMHESNDAPCGSSAEGAGGAGNANVSTNQWSGSGGGGGSRKKNSIRSQLAQQMLNSSTRVLKKPQYVVRPASGTGSSSSSGNGGSASATNGISNGSNQSGANSCGAGNGERGTNNGGLSGSNGLGNQHYSSSQNLALDPTVLKIIFRYLPQDTLVTCCSVCKVWSNAAVDPDLWKKMNCSEHKMSASLLTAIVRRQPEHLILDWTQIAKRQLAWLVARLPALKNLSLQNCPIQAVLALHTCLCPPLQTLDLSFVRGLNDAAIRDILSPPKDSRPGLSDSKTRLRDLKVMKLAGTDISDVAVRYITQSLPYLRHLDLSSCQRITDAGVAQIGTSTTATARLTELNLSACRLVSENALEHLAKCEGLIWLDLRHVPQVSTQSVIRFASNSKHDLCVRDIKLVERRRRNSTTANRSWHHD

SEQ ID NO: 30 - DNA, 1155 bp, Drosophila melanogaster
  CDS (1)..(1155): CT31117
atgccgcccattgcccaggagggcaattgcctgatttaccgcggcagcaacttcctcaagcagcgcctaatcctcgcctgcctgtccggcaaaccggtgaagatcagccaaatccgttcggaggacgaaacggcacccggtctgcgggagtacgagataagtttaattcgcctgcttgataaaatcaccaatggaaccaagatcgaattgaatcccgccggtacgagtgtcatgttctcaccaggattactgcatggcggtcagctaaatcatgattgctgtgtccagcgtggcattggctactatctggacgccctaatagccttgggtccattttgcaagagtccgctacagtgcaccctgcgcggtgtgaccaatagcaaggactcgccatccgtggaccacatcaagggtgcagctctatccctgctcaagcgattccttctagtcgacgagggcctcgaactcaaggttgtgcgccgaggagttgctccgctgggcggcggagagatcatcttcaggtgtccggtgcgaaagagcctgcgtgccatacaatttcagtcacagggcatggttaaacgcattcggggcactgtttatgcctgcaaagtctctccggcgatggccaatcgcaccgtggaagcggctaagggatgcatgctaaagttcctgccggatgtctatatttacacagatcagaataagggcaagatgtcgggtaattcgcccggatttggcatctgtctgattgccgagactacggacggtgtgtgcttcgccgccgattgctgttccaacacaagagaggagtcggaggatacaccatccatacccgagaatctgggcaaggaggtggcactgcgtttgctagacgagatttatcgcggtggctgtgtagactccagctatcaatggctggcggcactctatatagcactggggcaaaagcatgtctccaaattcctcaccggtgccctgtccaattacaccgttcactttctgcaacatttgcgcgacttcttctcgatcaccttcaagctggagaatcccgaggcggaggacgaggacgaagcggagaatgtgcgcggtgcccagaaggttcttatggcatgtgttggaattggctacacaaatataaataagcgcgttatataa

SEQ ID NO: 31 - protein, 384 aa, Drosophila melanogaster
MPPIAQEGNCLIYRGSNFLKQRLILACLSGKPVKISQIRSEDETAPGLREYEISLIRLLDKITNGTKIELNPAGTSVMFSPGLLHGGQLNHDCCVQRGIGYYLDALIALGPFCKSPLQCTLRGVTNSKDSPSVDHIKGAALSLLKRFLLVDEGLELKVVRRGVAPLGGGEIIFRCPVRKSLRAIQFQSQGMVKRIRGTVYACKVSPAMANRTVEAAKGCMLKFLPDVYIYTDQNKGKMSGNSPGFGICLIAETTDGVCFAADCCSNTREESEDTPSIPENLGKEVALRLLDEIYRGGCVDSSYQWLAALYIALGQKHVSKFLTGALSNYTVHFLQHLRDFFSITFKLENPEAEDEDEAENVRGAQKVLMACVGIGYTNINKRVI

SEQ ID NO: 32 - DNA, 978 bp, Drosophila melanogaster
  CDS (1)..(978): CT1249
atgataacctccacgaccacggactacaaaaacttttttaaacactcggcacatcctgccaatgctgagcagtactttcgggaacttttggacaagcgtgagcgccgctatgaggatctgtgccgtaacatcatcagcgacatgaaccagtatggtctgtccgtggtggacgacttcctggggatggagacgggcctgaagatcctcaacgaggttcgaagcatgtacaacgcaggagccttccaggatggccaagtggtgaccaaccagacgcccgatgcacccgcggtgcgcggtgacaaggtccgaggcgataagatcaagtgggttggtggcaatgagccgggctgcagcaatgtctggtatctgaccaatcagattgactctgtggtgtatcgtgttaacacgatgaaggataatggcatcttgggcaactaccacatcagggagcgcacgagggcaatggtcgcttgttatccgggatcgggaactcactacgtcatgcatgtggacaatccccaaaaggatggccgcgttataacggccatatactacctgaatatcaactgggatgcgcgggaaagtggcggcattctgcgaattcggccaacacccggaaccacagtggcggatattgagcccaagtttgatcgcctgatattcttctggtctgacattcggaatccccacgaagtgcagcccgctcaccgtacccgctatgccatcaccgtctggtacttcgatgccaaggaacgcgaggaggccctcattagggccaagctggaaaacagcaagacgaacaatctggcagctcaagcccaagcccaacaggctgaaccagactccaccaccacaccacccgcagcaccagcttcatccgcatccagtctgccggctagcatgtccacgggaacgggagcgctgaacgccaatgtgtcgagtaattcctgcgccaccagcagcgaaatatgcacgtaa

SEQ ID NO: 33 - protein, 325 aa, Drosophila melanogaster
MITSTTTDYKNFFKHSAHPANAEQYFRELLDKRERRYEDLCRNIISDMNQYGLSVVDDFLGMETGLKILNEVRSMYNAGAFQDGQVVTNQTPDAPAVRGDKVRGDKIKWVGGNEPGCSNVWYLTNQIDSVVYRVNTMKDNGILGNYHIRERTRAMVACYPGSGTHYVMHVDNPQKDGRVITAIYYLNINWDARESGGILRIRPTPGTTVADIEPKFDRLIFFWSDIRNPHEVQPAHRTRYAITVWYFDAKEREEALIRAKLENSKTNNLAAQAQAQQAEPDSTTTPPAAPASSASSLPASMSTGTGALNANVSSNSCATSSEICT

SEQ ID NO: 34 - DNA, 2961 bp, Drosophila melanogaster
  CDS (1)..(2961): CT1483
atgcaacgcggcattgactcctttttcaaacggctgccggccaaggcgaaaagtgccgaggccgaaaatggagagacgccgtcgaaggcgccaaaacgcaggaaagccgtgataatttccagcgacgaggacgaggtggtcagtccgccggagaccaagaaacgcaaggcttcgaagacagcatccagcgaggatgatgtggtggccgccacaccggaaccgattgcgaagaaggccaggaacgggcagaaaccagcgctctccaagcttaagcggcacgtagatcctacggagcttttcggtggagaaaccaaacgggtgattgtgcccaagccgaagaccaaagctgttctcgagttcgagaacgaagacattgaccggagtttaatggaagttgatctggacgagagtatcaaagaggctgcccccgaaaaaaaggttcactcgataaccaggagctctccctcgcctaaaagagcaaagaacagcagcccggaaccgccaaaacccaagtcaacaaaatccaaagccaccactccgcgtgtgaagaaggagaaacctgcggcagatctagaatccagtgtcctaacagacgaggaacgccacgagcgtaaacgtgcttccgccgtgctctaccagaagtacaaaaaccgcagttcgtgcctgaaccccggcagcaaagaaattccaaagggatccccggattgtctgagtggcttaacctttgtcgtaaccggagtcctcgagtccatggaacgagaggaggcggagtccgtgatcaaggagtatggcggaaaggtgatgaccgtggttggaaagaaactcaagtatctggtcgtaggagaagaggctggaccaaagaaattagctgtggctgaggaactcaatatacccattctcagcgaggacgggctcttcgatctaatcagggagaaatcaggaatcgctaagcaggtaaaggaagagaagaaaagcccgaagaaggagcacagctccgaggagaaagggaaaaaggaagtcaagacttctagaaggtccagtgataaaaaggagaaggaagccactaaactgaaatatggcgagaagcatgatatcgccaaacataaagtcaaggaagaacacacttccccgaaggagacgaaggataagcttaatgatgtaccagctgttaccttgaaagtaaaaaaagagcccagctcccagaaagaacaccctccgtcgccaagaactgccgatctgaagactctggatgtggtcgggatggcctgggtggacaagcacaagcctacgagcataaaagaaatcgttggccaggcaggagccgccagcaacgtgaccaagctgatgaactggttgtccaagtggtatgttaaccatgatggaaacaagaagccccaacggcccaatccttgggccaagaacgacgacggcagcttctacaaggcggccctactttcgggaccccctggaataggaaagaccacgacggcgactctggtagtgaaggagcttggcttcgatgcggtggagttcaacgcctccgacacacgcagcaaacgcttgctcaaggatgaagtgtccacgctgctgagcaacaaatccctctccggttactttacagggcaaggccaagcggtctcccgcaagcatgtgctcataatggacgaagttgatggcatggccggtaacgaggaccgtggtggaatgcaggagctgattgccttgatcaaggatagctctattccaattatttgcatgtgtaatgatcgcaaccatccaaaaattcgatccctggttaactattgctacgatctgcgatttcagaggcctcgcctcgagcaaatcaaagggaaaataatgagcatctgctttaaggaaaaagtaaagatatcaccggccaaagtggaagaaatcatagcggctaccaacaacgatattcggcaatccattaaccacattgccctgctgagcgccaaggaagacgcttcccaaaagtcagggcagcaggttgccaccaaggatctgaagctgggaccctgggaggtggtgcgaaaagtcttcaccgcggacgagcacaaacacatgtcttttgccgacaagagcgaccttttctttcacgactacagcctggccccgctctttgtgcagcaaaactatctgcaggtcctaccacagggaaacaaaaaggatgtcctggcaaaggtggcagctacggcagatgccctaagcttgggtgaccttgttgaaaagcgtattcgtgcgaattctgcttggagtcttctacccactcaggcctttttcagctcggtccttcctggcgagcacatgtgtggccacttcactggacagattaactttcccgggtggctgggcaagaattccaagtctggaaaacgtgccaggctggcccaggagctgcatgatcatactagggtctgcacctcgggctcaaggctatcagtgaggctggattacgcccccttccttctggataatattgtgcgacctcttgcaaaggatgggcaggagggtgtgcccgctgctttagacgttatgaaggattaccatctactccgtgaggatctggactcgctggtcgagcttacatcctggcccggcaagaaatccccactggacgcagtggatgggagagtaaaagccgctttaacgcgatcctacaacaaggaggttatggcatactcctattccgctcaagcaggcatcaaaaagaagaaatcagaggctgctggagcggatgacgattacttggacgagggtccgggcgaagaggacggagctggtggccacttatcatcagaggaagacgaggacaaggacaacctagagctggatagtttgatcaaagccaaaaagaggacaactacgtcaaaagcgtctggtggatccaaaaaggctacatcttccacggcttcaaagtctaaggccaaggccaaaaagtaa

SEQ ID NO: 35 - protein, 986 aa, Drosophila melanogaster
MQRGIDSFFKRLPAKAKSAEAENGETPSKAPKRRKAVIISSDEDEVVSPPETKKRKASKTASSEDDVVAATPEPIAKKARNGQKPALSKLKRHVDPTELFGGETKRVIVPKPKTKAVLEFENEDIDRSLMEVDLDESIKEAAPEKKVHSITRSSPSPKRAKNSSPEPPKPKSTKSKATTPRVKKEKPAADLESSVLTDEERHERKRASAVLYQKYKNRSSCLNPGSKEIPKGSPDCLSGLTFVVTGVLESMEREEAESVIKEYGGKVMTVVGKKLKYLVVGEEAGPKKLAVAEELNIPILSEDGLFDLIREKSGIAKQVKEEKKSPKKEHSSEEKGKKEVKTSRRSSDKKEKEATKLKYGEKHDIAKHKVKEEHTSPKETKDKLNDVPAVTLKVKKEPSSQKEHPPSPRTADLKTLDVVGMAWVDKHKPTSIKEIVGQAGAASNVTKLMNWLSKWYVNHDGNKKPQRPNPWAKNDDGSFYKAALLSGPPGIGKTTTATLVVKELGFDAVEFNASDTRSKRLLKDEVSTLLSNKSLSGYFTGQGQAVSRKHVLIMDEVDGMAGNEDRGGMQELIALIKDSSIPIICMCNDRNHPKIRSLVNYCYDLRFQRPRLEQIKGKIMSICFKEKVKISPAKVEEIIAATNNDIRQSINHIALLSAKEDASQKSGQQVATKDLKLGPWEVVRKVFTADEHKHMSFADKSDLFFHDYSLAPLFVQQNYLQVLPQGNKKDVLAKVAATADALSLGDLVEKRIRANSAWSLLPTQAFFSSVLPGEHMCGHFTGQINFPGWLGKNSKSGKRARLAQELHDHTRVCTSGSRLSVRLDYAPFLLDNIVRPLAKDGQEGVPAALDVMKDYHLLREDLDSLVELTSWPGKKSPLDAVDGRVKAALTRSYNKEVMAYSYSAQAGIKKKKSEAAGADDDYLDEGPGEEDGAGGHLSSEEDEDKDNLELDSLIKAKKRTTTSKASGGSKKATSSTASKSKAKAKK

SEQ ID NO: 36 - DNA, 1902 bp, Drosophila melanogaster
  CDS (1)..(1902): CT7860
atgtatccggtggcgtttgtcttgctgctgctggttgcacctaatgccgacgcgaatttgggacgcgatgacgaacgattccacgaggagctagtggttcgtccattgtccggcgaccatgtcaacacctactttcagttcaccacgcgctggcactacggcgaaaaggataatctttaccacacccaattgacgcctcgagtaattgcggagctgttgcagcagtttgcggtaaaggagctgcacattggcctaacccagggactgtggcgctacgagacatggggctatcccattgtggaggccaccagcggtgccgagatgtgggcgtggttcagtggcgcaaatttgaccaaccgggatgtggatcgccagtggaaggagttggccaacgttttctcgggcgtgttgtgcgcctcgttgaatttcgtcgacaatacgaatagcattgcaccgaggcacttgattcgtccacaatttatgccagccaatggccaaagattcgttcgctatgccacattgccgcgtgagatcgtgtgcacggagaatctgacgccgtggaagaaactactgccatgcggtagtgcctcaggctttgcctcacttctcaactcgggacatgtacacaacaccaaataccattcgctgggcctgaaggtgcgcgtgctctgcgaggatcacgatgaggacaattgcattgtggagctgacgcagacggccaacttggtctacgatctccgtctgttcgaattgagcaacaatgatttctcgctgcgccgcctgttcggcatgggactgaatggctattgtgagctggccgagagctccaagatctatgtgcagcgcaacgagctgggcgagcgctatcagctggttccagaacccgtgcacgaagtgaagaccactcgtggtgggcatagtgtcgtctattccgtctacgatatgcacgagcagttcaaagaggccggcgaacggctgtttaatgtcgcctggctggcgccgaagagcgcaaatcgtcgtcgcaatttggcgaagccatcactgccaccggtgacggttcatcgttatctattgggacacggccaggagcgtggcaggatcgttacggaggtgacgaactcgcactacgacgccctgcccataatgctgcaggaggtgataccgtggtatgtgcacgcctatttgcacaccctttccatacgtcgcaagccgcagcgggtcaacgaatacggaggccagcgattgaccttcaagctgctccactatacgcccggcaagcagagggaactgccgtcccatttggaaattggcttcatgctgcccggccagacatcggcgctgataagcatcgatgtggattatttgctgctcaaatggttggagtatccgccggatgcgaatcacggccattacatcggctcggccattgtgtccagccaactgccgatgggcagaaactataccgctctgccgccggaggggcatctctttgagcattcgttcaatgccacacgtccgagttatgttctcagtttgcacacggaagcgctgattgtctcactgcccacgccggactttagcatgccgtacaatgtgatctgtctcgcatgcacagtggttgccctggcctttggacccatacacagtgtggccaccaagatgatcattgtcggtcgtcagacatcggcgccgaagaattttgttaagaagatcttcaatcagcttttccggcgcggcaaggccaccgatgagacagctgccgagggcgaaggattgccagcggcaggagcagcagcaactggagttgcatcggggagagcagcgatatcgccaggcagtccatcgggcgaccagccgctgctggaagatctcgacgaggaggaggaggaggagcaggactaa

SEQ ID NO: 37 - protein, 633 aa, Drosophila melanogaster
MYPVAFVLLLLVAPNADANLGRDDERFHEELVVRPLSGDHVNTYFQFTTRWHYGEKDNLYHTQLTPRVIAELLQQFAVKELHIGLTQGLWRYETWGYPIVEATSGAEMWAWFSGANLTNRDVDRQWKELANVFSGVLCASLNFVDNTNSIAPRHLIRPQFMPANGQRFVRYATLPREIVCTENLTPWKKLLPCGSASGFASLLNSGHVHNTKYHSLGLKVRVLCEDHDEDNCIVELTQTANLVYDLRLFELSNNDFSLRRLFGMGLNGYCELAESSKIYVQRNELGERYQLVPEPVHEVKTTRGGHSVVYSVYDMHEQFKEAGERLFNVAWLAPKSANRRRNLAKPSLPPVTVHRYLLGHGQERGRIVTEVTNSHYDALPIMLQEVIPWYVHAYLHTLSIRRKPQRVNEYGGQRLTFKLLHYTPGKQRELPSHLEIGFMLPGQTSALISIDVDYLLLKWLEYPPDANHGHYIGSAIVSSQLPMGRNYTALPPEGHLFEHSFNATRPSYVLSLHTEALIVSLPTPDFSMPYNVICLACTVVALAFGPIHSVATKMIIVGRQTSAPKNFVKKIFNQLFRRGKATDETAAEGEGLPAAGAAATGVASGRAAISPGSPSGDQPLLEDLDEEEEEEQD

SEQ ID NO: 38 - DNA, 1737 bp, Drosophila melanogaster
  CDS (1)..(1737): CT1834
atggaggcatcaagaataaccgcgatcgccagcagtgcagtgtccgttaccgctcccaatccccccacagtgtccaccattcccacagcagctgcgagcacactaatccaggtaggcgtgtcgccagcaacaacaaccatgccaacaccagcagccacaacaacaacaaccacaataggaagtacagctagcagtgccgttggaatttcaacgccgatacgaaatcccatttcaaatctgcagatagaacagcaaaacgatcaaaagcgaagaagttcatcgcggacgattaaaaggaagcgttttgatgacgaaatagttgagtacaacattgcggtgcccacaaatcgcagcggaacagacgccaatcgcagcagcaggcctcgcaccacctcccagaattatccagctttggtgggcgtgccgcacaccacgttagcgcctcttaacatacccacttccacgccacagacgccgctttcagttgattccctgctgccggggacacctagcactgttgcatcgctgtcactggccacgcccacaacgccagctcccttggccactccccttccagttgccccaattgtgactgccgtcgcgcatcccaaaccaccggccatggagcgctccacgaccagcgagcgccgttcgcgcccagtgcgtcctgccagcaaaaaggcgcagcgtagaaatggtcgtcccatgggtcagatggccaccaaggatttgggccgctggaagcccattgacgacttggccctcataattggcatccagcagaccaacgatctgcggataatccatcgcggcgttaagttttcctgcaagtttactctgcaggaactacagcagcgctggtatgctctgctgtatgagcctgcggtgtccaggattgcagtgtccgccataaggaacctgcaccccgaactcgtggagtccgttcagcgcaaagctttgtacagcgtgcaggaggaggatctgcttggcaccattaagagctcggaacaaccaaaacttgagcagttccaggagctactggataagaatgcctccgttttctactgcgcccgcactgccaaatccttgcaaaaccattggcttcttctcaagcagtacaccctgttgccggatcagtcagtgaagcctatatatggcacggatcagcagccactcagcttctcggatgcagaagatcaaatcttcgagcacgacctgaacgagccacgtgacgaagctctcgagatggagcgagctctggcagatcgtcgcaacaaacgtaatattcgcctgctggagaacgagctctcgcgctgggccgtcctggtggattccgtgcttagtccgaccgctgcctccgagttcgacaaccagacactggcctgcttgtgtggccgccatgtgcggtacctaatgcgttccaaggaaataacatttggtcgcgatgccaaggactgtgtggtggacgtggatctggggctcgagggaccggctgcgaagatctctcgccgccaaggaaccattaagctgcgcagcaatggggatttcttcatcgctaacgagggaaagagggccatctttatcgacggcactcctttgctatccgccaacaaagctcgactcggtcacaactgcacagtggaaatatccggtctgcgcttcaccttcctggtcaactacgagctgatcaacgccatccgccaggagagcgccaagacatcgaatcccctcaactaa

SEQ ID NO: 39 - protein, 578 aa, Drosophila melanogaster
MEASRITAIASSAVSVTAPNPPTVSTIPTAAASTLIQVGVSPATTTMPTPAATTTTTTIGSTASSAVGISTPIRNPISNLQIEQQNDQKRRSSSRTIKRKRFDDEIVEYNIAVPTNRSGTDANRSSRPRTTSQNYPALVGVPHTTLAPLNIPTSTPQTPLSVDSLLPGTPSTVASLSLATPTTPAPLATPLPVAPIVTAVAHPKPPAMERSTTSERRSRPVRPASKKAQRRNGRPMGQMATKDLGRWKPIDDLALIIGIQQTNDLRIIHRGVKFSCKFTLQELQQRWYALLYEPAVSRIAVSAIRNLHPELVESVQRKALYSVQEEDLLGTIKSSEQPKLEQFQELLDKNASVFYCARTAKSLQNHWLLLKQYTLLPDQSVKPIYGTDQQPLSFSDAEDQIFEHDLNEPRDEALEMERALADRRNKRNIRLLENELSRWAVLVDSVLSPTAASEFDNQTLACLCGRHVRYLMRSKEITFGRDAKDCVVDVDLGLEGPAAKISRRQGTIKLRSNGDFFIANEGKRAIFIDGTPLLSANKARLGHNCTVEISGLRFTFLVNYELINAIRQESAKTSNPLN

SEQ ID NO: 40 - DNA, 1839 bp, Drosophila melanogaster
  CDS (1)..(1839): CT31875
atgaacagcttagtgcgacgcagcgcccagcagctgagcctctggcgtacatattgcataaagcacaatgcttcagaggcggcttctcccggacggaacgcaggcaggcccaactacgaggagttcattggccgtcatcagcgacaggcccagtgcagcattgtggtccaggtgagctccgaaaagtcgtatgaggagttgtataactactgcagcagcttcggctcgatcatgggtgcccaccactactgcgtgcggcaggacgagaccctgcactacatcctgctggagtacgccacgtcggacgaggcggcggctgccatcggagcgggcgttaccaatggcgagctgagcggcgtgcccgtgcgatctccctttctgtggttccgggcagcgggaggaggcagacggagccccaagctagttgccaatacagcgcccgcactgctatccttggacggcacccggcaggtggatcagcgccacctactggggctcttacgtggtgcagcggacatcgaagagcaggtgcagcagctgtacgagcacacgcgcctgaatgagctgggaatccgtatgcgctttctagccgccctacaggtgcagcaggccattgccggcatgtttcccgccgcccaggcacagccctttggctcgtcggtcaacggatttgggcgaatgggctgcgacctggacctcatcctgcgctttgacagcgatatgggagctaagatcccactggaggcggcggtgccctcgcgactcgtgtaccacaccaaggagaacctgagcaacggacgctcgcagacgcaaaggcacatggaatgttttggagatatgctgcatctgttcctgcccggcgtgtgccatgtgagacgtattttgcaggcgagggtgcccatcatcaagtaccaccatgagcatctggacctggaggtggacctctccatgagtaacctcactggcttttatatgtcggaactgctttacatgttcggtgaaatggatccgcgcgtacggccgttgacctttaccattcggcgctgggcgcagacctgcggcctcacgaatccctcgcctggtcgctggatcagcaacttctcgctcacctgcctggtcatgttcttcctgcagcagctgcgccagcccatccttcccacaattggagcgctggccaaggcggcggagccaggggactcgcgggtcaccgaggacgggatcaactgcaccttcacccggaatgtggatcgtctgggcttcaggagtcgaaaccaaagctcgctgagcgagttgttgctgcagttcttcgagttctactcgcagttcgacttccacaaccgtgcgatatctttgaacgagggaaagccgctgtccaagccggatcactcggccatgtacatcgtaaacccactggagcagttgctaaatgtgagcaaaaatgttagcctggaggagtgtgaacgactgcgcatcgaggtgcggaacgcggcttgggttctggagtcggaggtggagaatgcctccgttccggagggcgacggccaggagctctcctgcggcctgttgaacctgtttaagcatcccgaaaaggccgtcatccggccgaacatgttcttcaagccgcgcatggtcgaagtgagcgatctcttcgaacagaaggaggcgggagcaacgtccagctcaactcctcccacaccagccataacctacaagagtgcctctgtgcggcagcaggtgcagagcatcaaggctgctacgcgctccgaactaaagcagctgcgcggatcaggcagctcagttccgacgagcagtcccaataatcgacggcgaagcaggtaa

SEQ ID NO: 41 - protein, 612 aa, Drosophila melanogaster
MNSLVRRSAQQLSLWRTYCIKHNASEAASPGRNAGRPNYEEFIGRHQRQAQCSIVVQVSSEKSYEELYNYCSSFGSIMGAHHYCVRQDETLHYILLEYATSDEAAAAIGAGVTNGELSGVPVRSPFLWFRAAGGGRRSPKLVANTAPALLSLDGTRQVDQRHLLGLLRGAADIEEQVQQLYEHTRLNELGIRMRFLAALQVQQAIAGMFPAAQAQPFGSSVNGFGRMGCDLDLILRFDSDMGAKIPLEAAVPSRLVYHTKENLSNGRSQTQRHMECFGDMLHLFLPGVCHVRRILQARVPIIKYHHEHLDLEVDLSMSNLTGFYMSELLYMFGEMDPRVRPLTFTIRRWAQTCGLTNPSPGRWISNFSLTCLVMFFLQQLRQPILPTIGALAKAAEPGDSRVTEDGINCTFTRNVDRLGFRSRNQSSLSELLLQFFEFYSQFDFHNRAISLNEGKPLSKPDHSAMYIVNPLEQLLNVSKNVSLEECERLRIEVRNAAWVLESEVENASVPEGDGQELSCGLLNLFKHPEKAVIRPNMFFKPRMVEVSDLFEQKEAGATSSSTPPTPAITYKSASVRQQVQSIKAATRSELKQLRGSGSSVPTSSPNNRRRSR

SEQ ID NO: 42 - DNA, 309 bp, Drosophila melanogaster
  CDS (1)..(309): CT36241
atgaatccctacgagtatgagtcgactctagactgccgcgacgtgggcggcggccccactccggctcacgcccacccacacgcccaaggacgtacgctccccatgagcggccacgggcggccgacgacggacctcggtccggtccacggcagccagacgctccagcaccaaaaccaacagaacctgcaggccgcccaagccgccgcccagtcgtcccactacgactacgagtaccagcacttggcccaccgtccgccggacacggccaacaacacagcgcagcggacacacggaagacaaggtgagtaa

SEQ ID NO: 43 - protein, 102 aa, Drosophila melanogaster
MNPYEYESTLDCRDVGGGPTPAHAHPHAQGRTLPMSGHGRPTTDLGPVHGSQTLQHQNQQNLQAAQAAAQSSHYDYEYQHLAHRPPDTANNTAQRTHGRQGE

SEQ ID NO: 44 - DNA, 2136 bp, Drosophila melanogaster
  CDS (1)..(2136): CT1993
atgaaggttaggaactacattcccaacaagaacttcacagctttaatatgcacacacaaaaattgtaattttatccgtggaatcaatgggttagaatgccctaaactttgccaatgtctctatataattgatgacttggaattaaacatagactgcagcaatctgggtcttttgcaaattccgcccctaccaattccaatttatggcgatgtgaagttgaatttttccaataattctctctctcagttgccaactatgactttacctggatataaattggttaaaagacttgatgtttcgcggaataggttaaccaacttaagtatcaatcaccttccagcgaaactggactatcttgatgtaagcttcaacgaaataattaatatggggaacgatgtaatcaaatacttaagaactgtccccatctttaagcaaacaggcaatcaatggactattcattgtgatgacaagccgttattaaatttctttagacatctcaaattgataatacggatgaaaagtgctgaaatgaaacctatgttcttgcactcgttaaccgaattacctaaggggtttttgaagtttttgggaaagcacttcatttggctaggtgtgagaaaacaagaatactatttgatcaatgaggaacagttgttgcaaagtatgcatcgcaaactaaacaaccttaatacaattatgagcatctataagtatatggaatggcttcaccgaaaactaatattcgtcaatcgggagtatgatctattttatattcgtcaaatggcagccccctgtcctcataagtgcgagtgttgttatagccgcgattcacttattttaaaaatagactgcaggaataaatttgtatataactttcccgatatcgttgctagaaatagtcgtcttatgcgaaaacaaaatatgtctagtcctatggaactgcatttatctaaaaataatatatcaaacataaccatcgcaatgctaccaaaggaactaaggtttcttgatctacgtttcaataatctcgttaccctggatgacaaagtcctgagttaccttaagaaaaattcaattaaaactaaactttctgggaatccctggaattgcgactgtaagtcgagatcagtcctttccattttgagagatcacgaaccccttgagtatgacgtcacgttgaaacgttgcaatatatctccaacggattgtccagatgtttgtgtctgctgcttggataacttgacatggccatcatttattgtcgattgcagaggagaaggacttctacagatgccttcactttcaagcagggttacctatgtggacctaaggaataacaaccttacggccctgtcacagaagaatcgttcttctatcgagaacagatcgttaaagctgcatttgcttgacaatccctggtcttgttcttgcaacgatatagaaaagataaatttcatgaagagtgtgtcttcaagtatagtagacttcactgagataaagtgcagtaatggtgagaagctagtctcgattaatcagcatattgtgtgtccatctgacctcttttattatttggcactcgcgatctccctagtggccacgatcattgccttaaactttttgatatggttcagacaaccggtcctggtctggttctatgagcacggtgtgtgtctcagtctggcagccaagcgggaacttgataaggacaaaaggttcgatgcctttctggcgtttacccataaggacgaggctctgctggaggagttcgtggataggctggaacgtggtaggcccaggttccaactctgcttctacctgcgagactggctggcgggcgaatctattcccgattgcattggtcaatctataaaggactcgcggcgcattattgtcctcatgacagagaactttatgaattccacttggggtcgcctcgagttccgactggccctccacgccacctcacgcgatcggtgcaagcgtctgatagtggtgctctatccaaacgtgaagaacttcgacagtctggatagcgagctaaggacctacatggcatttaacacctatctggagagaagccatccgaacttttggaacaagctgatttactcgatgccgcataccaagctacgttga

SEQ ID NO: 45 - protein, 711 aa, Drosophila melanogaster
MKVRNYIPNKNFTALICTHKNCNFIRGINGLECPKLCQCLYIIDDLELNIDCSNLGLLQIPPLPIPIYGDVKLNFSNNSLSQLPTMTLPGYKLVKRLDVSRNRLTNLSINHLPAKLDYLDVSFNEIINMGNDVIKYLRTVPIFKQTGNQWTIHCDDKPLLNFFRHLKLIIRMKSAEMKPMFLHSLTELPKGFLKFLGKHFIWLGVRKQEYYLINEEQLLQSMHRKLNNLNTIMSIYKYMEWLHRKLIFVNREYDLFYIRQMAAPCPHKCECCYSRDSLILKIDCRNKFVYNFPDIVARNSRLMRKQNMSSPMELHLSKNNISNITIAMLPKELRFLDLRFNNLVTLDDKVLSYLKKNSIKTKLSGNPWNCDCKSRSVLSILRDHEPLEYDVTLKRCNISPTDCPDVCVCCLDNLTWPSFIVDCRGEGLLQMPSLSSRVTYVDLRNNNLTALSQKNRSSIENRSLKLHLLDNPWSCSCNDIEKINFMKSVSSSIVDFTEIKCSNGEKLVSINQHIVCPSDLFYYLALAISLVATIIALNFLIWFRQPVLVWFYEHGVCLSLAAKRELDKDKRFDAFLAFTHKDEALLEEFVDRLERGRPRFQLCFYLRDWLAGESIPDCIGQSIKDSRRIIVLMTENFMNSTWGRLEFRLALHATSRDRCKRLIVVLYPNVKNFDSLDSELRTYMAFNTYLERSHPNFWNKLIYSMPHTKLR

SEQ ID NO: 46 - DNA, 663 bp, Drosophila melanogaster
  CDS (1)..(663): CT34608
atgtattttaccattgccacatatgccaaacactcgaacacacacctgcagctgttcaccgcactgctcggaaactcgcccaagaaactcttctcatgccagctctgcggtaagctcctctgctcgaaagcttcgctcaagcgtcacattgccgacaagcacgccgtgcgccaagaggagtaccgctgcgccatctgcgagcgcgtctactgctcccgcaactcgctcatgacgcacatttacacgtaccacaagtcccgtcccggcgaaatggagatgaaggacattaagctctataaccacagcgtgccacagcaaagccaacagccacagcaacaatcaacagcgatgaaagacagcacgaccatgaccatgaccatgaccccgacaaccattaccacgccgactcaaactccaagccaggctcagactcctacctcaattccgatggcagatcaccaggatctagccatctacccaaagcgaccaatgccgctgaatgaccagtatcaactgctaatacagcagcgacagataatgaccctgtacgactactacctctaccagcgtaatagtcacagccacagtcacagtcacagtcgcaatcacggtcaaagtcacagcagcagtcacggtccttcaattgccaccacgagcaactaa

SEQ ID NO: 47 - protein, 220 aa, Drosophila melanogaster
MYFTIATYAKHSNTHLQLFTALLGNSPKKLFSCQLCGKLLCSKASLKRHIADKHAVRQEEYRCAICERVYCSRNSLMTHIYTYHKSRPGEMEMKDIKLYNHSVPQQSQQPQQQSTAMKDSTTMTMTMTPTTITTPTQTPSQAQTPTSIPMADHQDLAIYPKRPMPLNDQYQLLIQQRQIMTLYDYYLYQRNSHSHSHSHSRNHGQSHSSSHGPSIATTSN

SEQ ID NO: 48 - DNA, 654 bp, Drosophila melanogaster
  CDS (1)..(654): CT5404
atgaaccgttcgaacagctttgtcagctcgctgaaatggtggccactgcagggtcacaacaaccaaccggtggcgccacctgccagcggttactcccaatcggcgcccagctcgcccacctccaattggccaccgccactgcagcagcatcagaatcccacaaccggcaccgcccaccgcctactgccgcccagcgggcaaaagaatggaattgctggcggcaccgtgggcgccacattcggcagcagtgtggcagtgcaaaagctgcgcgaatccaagtggttcaagcccgaggagcagcgcatcttttgcgccgtcgtcgagtgcggtttcgtggtcgagatccgcagcagcgccgcagccgaggcggccgcagctaacgcagcagcagcggccgcagcagccgacaccggtgacaacgacctcgacgtggacgctctggaggagctcgactgcccactgaccaaccacccatcgccgccgcatcgcaatcacagccatagtcacagccaaatccaaaaccaatcccagcggctggtcatcccgcgcaacggtagcagtttcctggagacgcaggacgagaatgagacgcctgtcgcctcttggtatggaatcgtgctctgcaaggtggccaaagtgcacaaagcaaagtaa

SEQ ID NO: 49 - protein, 217 aa, Drosophila melanogaster
MNRSNSFVSSLKWWPLQGHNNQPVAPPASGYSQSAPSSPTSNWPPPLQQHQNPTTGTAHRLLPPSGQKNGIAGGTVGATFGSSVAVQKLRESKWFKPEEQRIFCAVVECGFVVEIRSSAAAEAAAANAAAAAAAADTGDNDLDVDALEELDCPLTNHPSPPHRNHSHSHSQIQNQSQRLVIPRNGSSFLETQDENETPVASWYGIVLCKVAKVHKAK

SEQ ID NO: 50 - DNA, 1380 bp, Drosophila melanogaster
  CDS (1)..(1380): CT17728
atgaaggcgaccagttgcagaccaattccattcatcaactttcggattgtaagatatttctatcggccacgacgattgaacaagtattacgatatttacagaatagctgcccttgtgcgggatcgcgcctgtctcttcacgtgccagcaggcctcgcagaacctgcagcagcagcagccccgcttttatagtgcgccaggtcgcagggccggcttcttctcgcagttcttcgacaacatgaaggcggagatggataagaacaaggagatcaaggacaatatccgaaagttccgtgaggaggcccagaagctggaagaatcggatgccctgaaatcggcgcggcaaaagtttaacattgtcgaatcggaggcgcaaaagtcgtctagcatgctaaaggagcagctgggcgccatcaaggagcgcgtaggcgatgttctggaggacgccagcaaatcccacctggccaaaaaggttaccgaggagctctcgaagaaggctaggggggtcagcgacacgatctccgacaccagtggcaagctgggccagaccagcgcattccaggctatctctaacacgacgacgaccatcaagaaggagatggacagcgcgagcatagagaatcgtgtctatcgtgctcctgccaagttgcgaaagcgcgtccagctcgtcatgagcgatagtgatcgcgttgtggagcccaacacggaagccactggtatggagctgcacaaggactccaagttctacgagtcgtgggagaacttcaagaacaacaatacctacgtgaacaaggtgcttgactggaaggttaaatacgacgagtccgagaaccctgttattcgtgcctcccgcctgctgaccgataaagtgtccgacgtcatgggtggactcttttcaaagacagagctttcggaaacgatgacggagctggtgaaaatcgatccgagctttgatcagaaggatttcctccgcgattgcgaaacggacatcattccaaatattctggaatcgattgtccgtggggatctggagattctgaaggattggtgctttgagagcactttcaatattatcgcaaatcccattaaggaggctaagaaggccggcgtgtacctggactccaagatcctcgacatcgagaacattgaactggcaatgggcaaggttatggagcagggcccggtactgattatcacgttccaagcccagcagattatgtgcgtgcgggaccagaagagtcaggtcgtcgagggagatccggagaaggtgatgcgggttcactacgtctgggtgctgtgccgcgaccgcaacgaactcaaccccaaggctgcctggcggctgatggagctgtccgccaacagctcagagcaatttgtttaa

SEQ ID NO: 51 - protein, 459 aa, Drosophila melanogaster
MKATSCRPIPFINFRIVRYFYRPRRLNKYYDIYRIAALVRDRACLFTCQQASQNLQQQQPRFYSAPGRRAGFFSQFFDNMKAEMDKNKEIKDNIRKFREEAQKLEESDALKSARQKFNIVESEAQKSSSMLKEQLGAIKERVGDVLEDASKSHLAKKVTEELSKKARGVSDTISDTSGKLGQTSAFQAISNTTTTIKKEMDSASIENRVYRAPAKLRKRVQLVMSDSDRVVEPNTEATGMELHKDSKFYESWENFKNNNTYVNKVLDWKVKYDESENPVIRASRLLTDKVSDVMGGLFSKTELSETMTELVKIDPSFDQKDFLRDCETDIIPNILESIVRGDLEILKDWCFESTFNIIANPIKEAKKAGVYLDSKILDIENIELAMGKVMEQGPVLIITFQAQQIMCVRDQKSQVVEGDPEKVMRVHYVWVLCRDRNELNPKAAWRLMELSANSSEQFV

SEQ ID NO: 52 - DNA, 1548 bp, Drosophila melanogaster
  CDS (1)..(1548): CT1465
atgcacggacgcgtaaaagtgaggaccacggaggaggagcgcgagcggaagaagaaggagcaggctctgaaagtccgggcctaccgtgcagccatgggaaggattcagaagaagagggaggcgggtgagctggacaacgaaatgctcagcctgacagttcagatcttgctgcggaatccggatgtcagcatgctgtggaacatccgcagggagtgcgtgctggagaagctgttcaggctaaaggaagaggaggccacgtgcgagacgcccagcgaggagaagccagagaaggaaaaccaaaccggtgagaataagccgagtgaaaagaaggccgctggcgaggacaaggcccattccattttcacctgcgaactggacctcaccgagcagtgcctaatggtcaacccgaagtcctacaacgcctggcaccaccgctgctggaccctggaacagaatcccagggcggactggcagcaggaggtgaaactgtgcaacaagtacctcaaattcgacgagcgcaacttccacacctgggactacaggcgctatgtgaccggcaaggccatggtgccggccacccaggagctggacttctgcaccgagaagatcagggctaacttctccaactactccagctggcaccaccgcagtctcctgcttccggagctctaccccaaccagcagagagaccggcccatgagtgaggagaagttgcagaaggagcttgaaatggtgctgaccgctgctttcacggatcctaacgacagcagtgcttggttctaccagcgctggttgctgggcagcggcgcccagttggatcgggctccaaggatagctgcttttcgactggagtcacatggagcagtcctcgcccttgacaagccctacccagatataaagcaattgaagactgagctagttgggggaggacaaacgattttactggagttctggctaccagtggacaagcgtggaaccagttggaagtgtcagcagaacttcgattaccaaagaaactcagcttactcccttaggctctccgatcagaaggttgacctctcgcctctgtctggctcggaaaacggagcctattacattgcgccgccacacggcactacgagttgcagcaaggatctcctggcggagctgcaaacgcagctgcaatcctgcctagatcttctggagtttgagccggacagcaagtggaccctactaacaagtgcccttctaatgcgtgctatcgatttctcagccaatcacgaaacgagcttggcgcacttggcaaagttggaaaaggtggattttttaagagagggttactacaaggacctcgctgctaggtggaccttggagtgggagcttgccaagtggccccaatcggccgactttcccaaaagatttgacatagcgaatgccgtactgctggaatcgcttccttatgatcaatacttagtcatcgctgatgaaataaccttgcccaacaaactgcgagacaaattgggggaatcagtgcccaaaacgtttgcagacttgaagttgcagtcatag

SEQ ID NO: 53 - protein, 515 aa, Drosophila melanogaster
MHGRVKVRTTEEERERKKKEQALKVRAYRAAMGRIQKKREAGELDNEMLSLTVQILLRNPDVSMLWNIRRECVLEKLFRLKEEEATCETPSEEKPEKENQTGENKPSEKKAAGEDKAHSIFTCELDLTEQCLMVNPKSYNAWHHRCWTLEQNPRADWQQEVKLCNKYLKFDERNFHTWDYRRYVTGKAMVPATQELDFCTEKIRANFSNYSSWHHRSLLLPELYPNQQRDRPMSEEKLQKELEMVLTAAFTDPNDSSAWFYQRWLLGSGAQLDRAPRIAAFRLESHGAVLALDKPYPDIKQLKTELVGGGQTILLEFWLPVDKRGTSWKCQQNFDYQRNSAYSLRLSDQKVDLSPLSGSENGAYYIAPPHGTTSCSKDLLAELQTQLQSCLDLLEFEPDSKWTLLTSALLMRAIDFSANHETSLAHLAKLEKVDFLREGYYKDLAARWTLEWELAKWPQSADFPKRFDIANAVLLESLPYDQYLVIADEITLPNKLRDKLGESVPKTFADLKLQS

SEQ ID NO: 54 - DNA, 798 bp, Drosophila melanogaster
  CDS (1)..(798): CT5438
atggcggccttaatcaggaatctgggtgcccgtgccgcagtcgccgctctgtcggccaaacatgtggtgcccgctgctggatccactgctcttcggatggccagtacaacgccagtggagcctaagaaggcggataagcccactgtccgccagccggacgcagtcgctcgctcgcatctctccgatttcgggcgctatgtggccgagtgcctgcccaagtacgtgcagaaggtgcagctgaccgccggcgatgagctggaggtgcttattgcgccagagggcgtggtgcccgtgctgcagttccttaaggatcatcatcaggcgcagtttaccaacctggttgacattgccggcgtggatgtgccctgtcgcaagaaccgattcgaggtggtctacaatttgctctcgctgcgctacaattcgcgcatccgcgttaagacctacaccgatgagctgactcctctggactccgcctgcgaggtgcataaggcggccaactggtacgaacgtgagatctgggacatgtacggcgtgttctttgccaaccatcccgacttgcgccgcatcctgaccgattacggttttgagggacatccccagcgccgcgacttcccgctgtccggctacgtagagctgcgctacgatgatgagaagaagcgagtcgtctgcgagcccttggagttggcccaggagttcaggaagtttgacttgtcggcgccttgggaacagttccccaacttccgcaacgctaatccccccgccgaggtagttccgccacaggctccagccaagaagtaa

SEQ ID NO: 55 - protein, 265 aa, Drosophila melanogaster
MAALIRNLGARAAVAALSAKHVVPAAGSTALRMASTTPVEPKKADKPTVRQPDAVARSHLSDFGRYVAECLPKYVQKVQLTAGDELEVLIAPEGVVPVLQFLKDHHQAQFTNLVDIAGVDVPCRKNRFEVVYNLLSLRYNSRIRVKTYTDELTPLDSACEVHKAANWYEREIWDMYGVFFANHPDLRRILTDYGFEGHPQRRDFPLSGYVELRYDDEKKRVVCEPLELAQEFRKFDLSAPWEQFPNFRNANPPAEVVPPQAPAKK

SEQ ID NO: 56 - DNA, 1914 bp, Drosophila melanogaster
  CDS (1)..(1914): CT43008
  misc_feature (1244)..(1244): y = c or t
  misc_feature (415)..(415): The 'Xaa' at location 415 stands for Pro, or Leu.
atgggaagcaacgacagagcatcgagatcgccgcgttcggatgatcagcgcgagatcagcgacatgccggccaccaaaagaacgcgttccgattcgggcaagtccacggattcgaaaattccctacctttcgcagcccctgtacgacctcaagcagacgggcgatgtcaagttcggtccgggtacccgttcggcgctcctcggcctcctgggcggcgccctgcccaagctctcctcggagcagcacgacctggtcagcaaggccaagaagtacgccatggagcagagcatcaagatggtgttgatgaagcagacactggcccaccaacagcagcaattggccactcagcgcacgcaggttcagcgacaacaggcactggctctcatgtgcagagtctacgtgggcagcatttcgtttgagctcaaggaggacacaattcgtgtggccttcactcccttcggccccatcaaatcaatcaacatgtcctgggatcccatcacgcaaaagcacaagggattcgcgttcgtggagtatgagataccggagggcgcacagctggcgctggaacagatgaacggagccctgatggggggcaggaacatcaaggtaggccgacccagtaacatgccacaggcgcagcaggtgatcgacgaggtgcaggaggaggccaagagcttcaaccgcatctacgtggcctccatccatcccgacctttccgaggaggacatcaagagcgtcttcgaggcctttggcccgatcctctactgcaagctggcccagggcacttcccttcacacgcacaagggctacggcttcatcgagtacgccaacaaacaggccatggacgaggcaatcgccagcatgaatctctttgatttgggaggccagcttctgagagtgggtcgatctattacgccgccgaatgccctggcctgtcccacaacgaactccacgatgcccacggctgcggcagtggctgcagcggcagcaacggcaaagatccaagccctggacgcggtggccagcaatgcggttcttggtttgtcgcagaacactcctgtcatggcagctggagcagtggtcactaaggtgggtgcaatgccagtggtttcggcagccacatccgcggctgctctgcatcctgctttggctcaagccgctcccgctcttctgccgcccggaatattccaggcaccaactccggtggctcccagtttgcttggggttcctgctggcctgcaacytctacaggcggtagtgcccactcttccgccgcccgcccttctggccacacccaccctgcccatgacggtcggcggcgttggcgtgggcttagtgcccactgtggccactctggcgggagcggaggccagcaaaggagctgcagctgctgccgccctctctgccgctgcaaacaatgccgctgtcacggcagcaaatctctcggagaacatcaagaaggcgcacgagaagcagcaggaggagctgcagaagaagctgatggatgagggcgacgtgcagacgctgcagcagcaggagaacatgtccatcaagggccagagcgcgcggcagttggtaatgcagcgactgatgcggccggtggactcacgtgtaatcatcctgcgaaatatggtcggacccgaggatgtggacgagaccctgcaggaggagatccaggaggagtgcagtaaattcggcaccgtcagtcgcgtgatcatcttcaacgagaagcagacggagaacgaggacgacgacgaggcggagatcatcgtgaagatcttcgtggagttctcggcaggagcggaggccatgcggggcaaggaggcactcgacggccggttcttcggcggtcggagagtggtggccgagctctacgaccagggcatcttcgatcagggagatctgtccggttag

SEQ ID NO: 57 - protein, 637 aa, Drosophila melanogaster
  misc_feature (415)..(415): The 'Xaa' at location 415 stands for Pro, or Leu.
MGSNDRASRSPRSDDQREISDMPATKRTRSDSGKSTDSKIPYLSQPLYDLKQTGDVKFGPGTRSALLGLLGGALPKLSSEQHDLVSKAKKYAMEQSIKMVLMKQTLAHQQQQLATQRTQVQRQQALALMCRVYVGSISFELKEDTIRVAFTPFGPIKSINMSWDPITQKHKGFAFVEYEIPEGAQLALEQMNGALMGGRNIKVGRPSNMPQAQQVIDEVQEEAKSFNRIYVASIHPDLSEEDIKSVFEAFGPILYCKLAQGTSLHTHKGYGFIEYANKQAMDEAIASMNLFDLGGQLLRVGRSITPPNALACPTTNSTMPTAAAVAAAAATAKIQALDAVASNAVLGLSQNTPVMAAGAVVTKVGAMPVVSAATSAAALHPALAQAAPALLPPGIFQAPTPVAPSLLGVPAGLQXLQAVVPTLPPPALLATPTLPMTVGGVGVGLVPTVATLAGAEASKGAAAAAALSAAANNAAVTAANLSENIKKAHEKQQEELQKKLMDEGDVQTLQQQENMSIKGQSARQLVMQRLMRPVDSRVIILRNMVGPEDVDETLQEEIQEECSKFGTVSRVIIFNEKQTENEDDDEAEIIVKIFVEFSAGAEAMRGKEALDGRFFGGRRVVAELYDQGIFDQGDLSG

SEQ ID NO: 58 - DNA, 1143 bp, Drosophila melanogaster
  CDS (1)..(1143): CT5902
atgtttatttggcattacttgaccctcttgtgccttgggttcgccctcatcgatgcgaaatccatcaagaagtcgcaggccaatctgttggagccaactcttgatcctgatgagaagctagggaagattgggaagtccccacccgacatttccaatgatgtgcaacgtgtgcaggttccattaggtgcgacgcccggcaagaatggctggcagggcaagtggtttccccatgcccctggacaacagcaggaagcgattgaattaaaaatgaagagcaccacggaggaagttcctccgctggagttcacaaccaaggatggctggcagggcaagtggtttccacaagctcccggagagccgcacttggtgaagaaaaaaccgctggtcgataacaaaaccaagtcggggaagtccaccacacaggatacttggcagggtaaattgtttccgcagggtcccaatgaatcgcacaagactaaacaaagcagctgtgatgatggcaagagcaatcttgccgtggacttcgatccaaacgacatccgtgacagcctgaatttcctatgcatcagtagtaatcacagcttgtaccaaccggatttgtccagagaagccattcttacggagcactttctacctagcgcctatctgccgcctgccaagtgccttaatgagtccattagctactcccatctgcctgccaccaatggcccctatcgcccgatgcccgctgaatatggcacctattcctacttgcctcctcagcgatacgtgcgtaatctggcggaaggtgccatcgtaatgctctaccatccctgcgcttttcccggccaagtgaagcagctgcaagacatcgtgggtggctgtctgtatcgccatctggtgtcaccctcgctggctctgagtccgcagcgaccgctggccctgctcgcctggagtcgcagcctcgagatgtccgtcgtggatcgacaactggcggcggacttcatccagaaacacgccaagcaaggaccacttgcaccggaggaattgtcgcgtttgattgtcaagagacagacctacaaggagggccttcttagggaagcgcacttggtcaacacggcggacgactacgagctgtgcggctacctacaggaggatatgtaa

SEQ ID NO: 59 - protein, 380 aa, Drosophila melanogaster
MFIWHYLTLLCLGFALIDAKSIKKSQANLLEPTLDPDEKLGKIGKSPPDISNDVQRVQVPLGATPGKNGWQGKWFPHAPGQQQEAIELKMKSTTEEVPPLEFTTKDGWQGKWFPQAPGEPHLVKKKPLVDNKTKSGKSTTQDTWQGKLFPQGPNESHKTKQSSCDDGKSNLAVDFDPNDIRDSLNFLCISSNHSLYQPDLSREAILTEHFLPSAYLPPAKCLNESISYSHLPATNGPYRPMPAEYGTYSYLPPQRYVRNLAEGAIVMLYHPCAFPGQVKQLQDIVGGCLYRHLVSPSLALSPQRPLALLAWSRSLEMSVVDRQLAADFIQKHAKQGPLAPEELSRLIVKRQTYKEGLLREAHLVNTADDYELCGYLQEDM

SEQ ID NO: 60 - DNA, 3069 bp, Drosophila melanogaster
  CDS (1)..(3069): CT6734
atggcgctggccattaagaagcgcgtaggcacctacgtggaaacggtggacgggtcgccgccggtgaagaagctgcgtctgcaaacgctggccgctgatgccaagggcgggaaatccggaaaagtgggcaatgtggagcgcaagctgacggcgctcaaccaattggacgcctatgtgggcaacctgcccgccggtgcgttggtcctgcccactgggacaccagttgcttcgacgggagccccgtcaacaggtgtcatcggaaatccgccggctgcggcgactggagctcccccaatgacggccgcgaatagcagggaactgctggagctcttggtcaagataaccgatgagatatcctatgaggacgtggaaatgggcgagcttaaggaggtggccagcaagatcttccaactgtatcagctgcaggaacgcgatagcgacacctccatccgggtgaagctgctcgagctgctgtccggattgggttgcgagtgtgccaccgagcaggcgcttaccatgatcatcgactactttatcttcttgttgaggaaggaggtgtcccaaaaggtgctcgcccagggcatgatgtgcctgtttcgaatcggggagcgcaggaagcacatgttgcccatatcgtacaaaacccaggtggcccacctagccaaggagcagctgcgctccggttcggcgcatacgcagaagaacgccatgctggtaatcggtcgttttgccaccaaaatggagggtgagcgtcattacgtatggaagttagccttctacatcgactcgcaggactcgagcgttcgtgcccaggctctgcacgccctgctgaccctcggcgaacggggatcccaactgccggcggtgctctataagcgtgccgtcgaggccatgaaggatgactacgagtgtgtgcgcaaggaagctctacagctggtcttcatgctgggcaatcggcatccggactacattttaccctcggaccgccagcaggaggagctgcgcatgatagacgctgcgttcagcaaggtctgcgaagccctgtgcgatctatcgctgcaaattcgcgtgctcgcagcggaattgctcggtgggatgaccgccgtaagcagggagttcctacaccagacactcgacaaaaagctgatgagcaatctgcgccggaagcgaacggcgcacgagagaggtgctcgcctggtggccagcggtgagtggtcatcgggtaaacggtgggcggacgatgcgccgcaagagcacctcgatgctcagagcatctcaattatagccagcggcgcctgtggcgcccttatacatggcctagaggatgagttcctcgaggtgcgtactgcggcagtggcctccatgtgcaagctggccctctctcgaccggatttcgcggtgaccagcctagatttccttgtggacatgttcaacgatgagatcgaggatgtgcggctgaaggccatctatagtttaacggccattgccaagcacatagtgctgcgcgaggatcagctggagataatgcttggatcgcttgaggattactccgtggacgtgcgtgagggactacatctcatgctgggcgcctgtagagtgtccacacaaacgtgcctgctaatggtggtgcagaagctgctagatgtgctggccaagtatccacaggatcgtaactccacctatgcctgcatgcgcaagattggccagaagcatccacatttggtgatggctgtcgccgttcacctgctttacgtgcatccctttttcgagacgcccgaacgcgatgtcgaggatccagcgtatctgtgcgttctgatacttgtcttcaatgctgcagaacatttggtgcccattatcagtttgctgcccacggccacccatcgccattacgcctatctgagagactcgatgccgaatctggtgccccagttgcccattgagggtgcgtcctcggcgagtgcgacgcacaggatcgattcggctatgcaccaagcgggcagttcggcggagtacctgcagatgattctcagtcacatcgaagagatcttcaccatgactgacgagcgcttggagctgctccagactgcccaatctaatctgcagcgcctgggatccattgatgcgggcatgtacggcacctcaaactttctagagaccttcttggcggcccagatccagatcgaacagatgcagcgttgcgccagcacgcaacgaagcagggtgcccttgaaggaatcactggcagcactcatccgaaactgtctcaagctgcagcacactttctccggcctcaattacggcgatatcttgcaggtgaagcagctgcgcctgagggcttgcgcgcttcacttggtcctcgtggtcagggatcgctcacagagtgcattgggcccgtgccagatgcttttgcaaaccgccggcgatataagtgagttcatcaaggcgaatacgaaggatgaggaggagaagccaccggtggtagagaccgatatgcccatgaaagagtcggtcagtagggatgcccagccggatagcttcacccgccagctgctaatcaaactggatggcatatcggatcccaagccgggtcgcgtctttcgcgaaattctgccgctggtccagcaggctcctccgcttgcattgccacccgccaatgacaaaatacgccgctgtgtggccaacatccttgagccgtgtccgctgcaatcgcaggataatgtaattaaggtcacggctggcctgatagcagccgttccttttgttgcggaaatcgacaatctgctggagtcccagaaggcggacatgcggatcaagatcaagtatccggaccagcacatgcacaccgtggtgccgaagcagagtgacttcaagcccattatgacggagcagggcgagcacaagaccaatgtgcgcctgcgcaccacaatcctgctgtcgcacagcgtttggacggagtcgtcgctggtggagatccaactgtgcctggccgtgcgtcccggcagcgaactggagctctgcaagccggcaaaggtgctgttcgcacccaaaccagtcaggcggggcatttaa

SEQ ID NO: 61 - protein, 1022 aa, Drosophila melanogaster
MALAIKKRVGTYVETVDGSPPVKKLRLQTLAADAKGGKSGKVGNVERKLTALNQLDAYVGNLPAGALVLPTGTPVASTGAPSTGVIGNPPAAATGAPPMTAANSRELLELLVKITDEISYEDVEMGELKEVASKIFQLYQLQERDSDTSIRVKLLELLSGLGCECATEQALTMIIDYFIFLLRKEVSQKVLAQGMMCLFRIGERRKHMLPISYKTQVAHLAKEQLRSGSAHTQKNAMLVIGRFATKMEGERHYVWKLAFYIDSQDSSVRAQALHALLTLGERGSQLPAVLYKRAVEAMKDDYECVRKEALQLVFMLGNRHPDYILPSDRQQEELRMIDAAFSKVCEALCDLSLQIRVLAAELLGGMTAVSREFLHQTLDKKLMSNLRRKRTAHERGARLVASGEWSSGKRWADDAPQEHLDAQSISIIASGACGALIHGLEDEFLEVRTAAVASMCKLALSRPDFAVTSLDFLVDMFNDEIEDVRLKAIYSLTAIAKHIVLREDQLEIMLGSLEDYSVDVREGLHLMLGACRVSTQTCLLMVVQKLLDVLAKYPQDRNSTYACMRKIGQKHPHLVMAVAVHLLYVHPFFETPERDVEDPAYLCVLILVFNAAEHLVPIISLLPTATHRHYAYLRDSMPNLVPQLPIEGASSASATHRIDSAMHQAGSSAEYLQMILSHIEEIFTMTDERLELLQTAQSNLQRLGSIDAGMYGTSNFLETFLAAQIQIEQMQRCASTQRSRVPLKESLAALIRNCLKLQHTFSGLNYGDILQVKQLRLRACALHLVLVVRDRSQSALGPCQMLLQTAGDISEFIKANTKDEEEKPPVVETDMPMKESVSRDAQPDSFTRQLLIKLDGISDPKPGRVFREILPLVQQAPPLALPPANDKIRRCVANILEPCPLQSQDNVIKVTAGLIAAVPFVAEIDNLLESQKADMRIKIKYPDQHMHTVVPKQSDFKPIMTEQGEHKTNVRLRTTILLSHSVWTESSLVEIQLCLAVRPGSELELCKPAKVLFAPKPVRRGI

SEQ ID NO: 62 - DNA, 780 bp, Drosophila melanogaster
  CDS (1)..(780): CT7760
atgaccacagcagcgcgtccgaccttcgatccagcccgcggaggatccggtcgcggcgaaaaggatctgagtgcactgagcaagcagtactccagtcgcgatttgccaggccacacgaaactgaaatacagggagactggccagggcaccagcgatgagaaccgcaaccgtgacttccgcaaggagctggaggagcgcgaacgtgaggcgcgctccggaacgggagccacttcgtcgtcgtcgggcaaggcactgccctccattgtacgcaaggcgattgaggcgaacaacgccggcggtggcagcagtgccgcaaagcgttccaagccggacgcagggcagcagcaagcgcagcaggcggctcagcagcaggccgccaatatggacgccgatgagccgctggacaacgatagctccgattcggacagcgattccgatgacgatgatgccgccctgctggccgagctgcagaagatcaagcaggaacgtctgcaggagacggcgcgtcgcgagtcggaaaagaagcaggaggacgaacgcatacgcatggagaacatcctgtccggcaatccactgatgaactatgagcccggcaccgccgcctcggcagcgggacgtgcctctggactgggcggtgatctaaagataaagcgccgctgggacgatgatgtggtctttaagaattgcgccagatctgcgcccgataagaagacgcacttcgtcaatgacgccctgcgctccgatttccacaagaagttcatggacaagtacattaagtaa

SEQ ID NO: 63 - protein, 259 aa, Drosophila melanogaster
MTTAARPTFDPARGGSGRGEKDLSALSKQYSSRDLPGHTKLKYRETGQGTSDENRNRDFRKELEEREREARSGTGATSSSSGKALPSIVRKAIEANNAGGGSSAAKRSKPDAGQQQAQQAAQQQAANMDADEPLDNDSSDSDSDSDDDDAALLAELQKIKQERLQETARRESEKKQEDERIRMENILSGNPLMNYEPGTAASAAGRASGLGGDLKIKRRWDDDVVFKNCARSAPDKKTHFVNDALRSDFHKKFMDKYIK

SEQ ID NO: 64 - DNA, 864 bp, Drosophila melanogaster
  CDS (1)..(864): CT9355
atgcgcttggagttgttggttgtgttattggtggggctggctgcacttgccccgtcaggttctacatgctgtaaaactgaaccaccgagatgcgaaaccgaaccaccgagatgcgaaaccgaaccgccaagatgcgaaaccgaaccaccaagatgcgaaaccacgccacccacatgcaaaactgagccacccacatgcaaaactgagccacccacatgcagaactgagccacccacatgcaaaactgagccacccacatgcagaactgagccagccacatgcaaaactgagccacccacatgcagaactgagccacccacatgcaaaactgagccacccacatgcagaactgagccacccacatgcagaactgagccacccacatgcaaaactgagccacccacatgcagaactgagccacccacatgcaaagctgagccacccacatgcagaactgagccacccacatgcaaaactgagccacccagtgaaaagcactgcacgaaacgcatcaagcgacaccgcacaaaaagaaccaagcgatcgaaatccaccaaaaagatagtacatcatcataaccgtccaggaacgacaccagaatcgggatgtggctgtggatcgaaaaacgaatcgggcggtggaggaagcggatgtattttgaaggacctgctaacaccgaagtgccccgattccaaatcgaagtctcaagcttcgtgcaagcctgcacccaagtgtaaatccgacccgaaaccgaaagccgcatcgaaagccacatctaagccaaagccaaaggcgtgtgattcaggcaagaagaacaccaccaagaaaccgcggaagactcagccacaaaaaggtggttgctaa

SEQ ID NO: 65 - protein, 287 aa, Drosophila melanogaster
MRLELLVVLLVGLAALAPSGSTCCKTEPPRCETEPPRCETEPPRCETEPPRCETTPPTCKTEPPTCKTEPPTCRTEPPTCKTEPPTCRTEPATCKTEPPTCRTEPPTCKTEPPTCRTEPPTCRTEPPTCKTEPPTCRTEPPTCKAEPPTCRTEPPTCKTEPPSEKHCTKRIKRHRTKRTKRSKSTKKIVHHHNRPGTTPESGCGCGSKNESGGGGSGCILKDLLTPKCPDSKSKSQASCKPAPKCKSDPKPKAASKATSKPKPKACDSGKKNTTKKPRKTQPQKGGC

SEQ ID NO: 66 - DNA, 5496 bp, Drosophila melanogaster
  CDS (1)..(5496): CT12665
atggccgaatttctggactccgaggccgaggaatcggaggaggaggaagaattggacgtcaacgagcgcaagagactcaagaaactgaaggcggccgtctccgatagtagcgaagaagaagaagacgacgaggaacggctgcgcgaagagctcaaagatctgatcgacgacaatcccatcgaggaggacgatggcagtggttacgattccgatggcgtcggcagcggcaagaagcgcaaaaagcacgaggacgacgatctggacgatcgactggaggacgacgactacgatcttatcgaggagaatctgggcgtcaaagtcgagagacggaagcggttcaagcgtctgcgtcgcatccacgacaacgaaagcgatggcgaggagcagcacgtggacgagggtctggtgcgtgagcagattgccgagcagttgttcgacgagaacgatgagagcattggtcatcgcagcgagcgcagtcacagggaggcggacgactacgacgacgtggatacggagtcggacgcagatgacttcattgtggacgataatgggcgtcccatagccgagaagaagaagaaacggcgccccatctttacagacgcatcacttcaagagggtcaggacatctttggcgtagacttcgactatgacgacttctcaaagtacgaggaagacgactacgaagatgactcggaaggagatgagtacgatgaggatctgggcgtcggcgatgatacgcgcgtcaagaagaagaaagcgctcaaaaagaaggtggtcaagaagacaatcttcgacatatacgagcccagcgagctcaagcgtggtcatttcaccgatatggacaacgagattcgcaagacagacatcccagaaagaatgcagctgcgagaggtgcccgtaaccccggtgcccgagggatcagacgagctggacctcgaggctgaatggatctacaaatatgccttctgcaagcacactgtttcggaacaggaaaagccggagagccgcgagaaaatgcgcaaaccaccgacaaccgttaacaagattaagcagacgctagaatttatacgcaaccagcagttggaggtgccctttatagccttctatcgcaaggagtatgtgaagccagagcttaatatcgacgatctctggaaggtttactactacgatgggatctggtgtcagctaaacgagcgaaagcgcaagctaaaggtgcttttcgaaaagatgcgtcagttccagctggacacgctatgcgccgacacagatcaacccgtaccggatgatgttcgcctcatcctggacagcgatttcgagcgcctcgccgacgtacagtcgatggaggagctaaaggacgtgcacatgtactttctgctgaactattcgcatgagctgccccgcatgcaggcggagcagcgacgaaaagctatacaggagcgtcgcgaggccaaggcgcgtcgccaggcagccgccgctgagaacggtgatgatgcggccgaggcgatagttgtaccagagccggaagacgatgacgatcccgagctgatcgattaccaactaaagcaggcgtccaacagcagtccctatgcggtattccgcaaggcgggcatctgcggctttgccaaacactttggtctcacgccggagcagtatgccgaaaatctgcgcgacaattaccagcgcaatgagatcacccaggaaagcatcggtcccacagagctggccaagcaatatttgtcgccgcgcttcatgaccacggatgaggttatccatgccgcaaaatacgttgtggcccgacagctggcacaagagcctctgctgcgcaagaccatgcgtgaggtgtatttcgacagagctaggattaacatacggcccaccaagaatggcatggtgctgatcgatgagaattcgccggtgtattcgatgaagtacgtggccaagaagccggtaagcgatctatttggcgatcaattcataaagctaatgatggccgaggaggagaagctgctggagataacgttcctcgaggagttcgagggcaatgcgtgtgccaacggaacacccggtgactatgtggaagagtccaaggccctgtaccagctggatcagtttgccaagcacgtgcaggagtggaataagctgcgggcggaatgcgtacagctggcgctgcagaagtgggtcattccggatctgatcaaggagctgcgctcaactctgcacgaggaggctcagcaatttgtgctgcgttcctgcacgggtaagctgtataagtggctaaaggtggcaccctataaaccgcaactgccccccgactttggctacgaggagtggagcacgctgaggggcatacgggtgctgggtctggcctacgatcccgatcactcagtggccgctttctgtgcggtgactaccgtggagggcgacatctccgactacctgcgactgccgaacattctgaagcgcaagaattcttacaaccttgaggagaaggcccagaagttggccgaccttcgaaagctgagtgactttatcaaaatgaagaagccacacattgttgtcatcggagcggaatcgcgcgatgcccagaacatccaggcagacattaaggagattctgcatgaactcgagacctccgaacaatttccgcccatcgaggtggagataatcgacaacgagctggccaagatctatgccaactcgaagaagggcgagtctgactttaaggagtatcctcctctgctgaagcaggctgcttcgctggcccgcaagatgcaggatccgctagtggaatactcacagctgtgtgatgcggacgacgagattctctgcctgcgctaccatccgctacaggagcgtgtgccgcgcgaacagctgctggagcagctcagcctgcagtttatcaatcgaacgagcgaggtgggtctggacattaacctgatggtgcagaactcacggaccatcaacctgctgcagtacatctgtggcttgggtccgcgcaagggtcaggctttacttaaacttcttaagcagagcaaccagcggttggagaaccgcacccagctggtcaccgtgtgtcatctggggcccagggtctttatcaactgcagcggtttcattaagatcgatacctcatcgctgggcgacagcacagaggcgtatgtcgaggtgctggacgggtcgcgtgtgcatccagaaacgtacgagtgggccagaaagatggccatcgatgccatggagtacgacgacgaggagaccaatccggccggtgcccttgaggaaattctcgagtcgccagagcgccttaaggatctcgatctggacgcattcgctgtggaactggagcgccagggattcggcagcaagagcataaccttgtacgacataaggaacgagttgagctgcctgtacaaggactaccgcactccgtacacaaagcccagtgcggaggagctcttcgatatgctgaccaaggagacgcccgactcgttttatgtgggcaagtgcgtcacggccatggtcaccggtttcacctaccgtcggccgcagggcgatcagctagacagcgcaaatccggtgcgtatagattccaacgaaagctggcagtgccccttctgccacaaggacgacttcccagagctgtccgaggtgtggaatcactttgacgcgaacgcgtgccctggccagccatctggtgtgcgtgtgcgtctggagaacggcctgcctggctttatacacatcaagaacttgtccgatagacaggttcgcaatcccgaagaacgtgtgcgcgtctcacagatgattcatgttcgcatcattaagatagacattgaccggttctcagtcgaatgctcttcgaggaccgctgatcttaaggatgtgaacaatgagtggcggccgcgtcgcgacaactactatgattatgtgactgaggagcaggacaatcggaaagtgagcgatgccaaggccagggctctgaagcgcaaaatttacgcgcgtcgcgtaatcgcccatcccagcttcttcaacaagtcgtacgcagaggtggtggccatgctagcggaggccgatcagggcgaggtggccctgcgtccgagcagcaagtccaaggaccatctgacagccacctggaaggtggccgacgacatcttccagcacatcgatgtgcgcgaggagggtaaagagaacgatttcagcctgggcagaagtctgtggatcggcaccgaggagttcgaggatctggacgagatcatcgcccgccacatcatgccgatggccttggctgcccgcgaactgatacagtacaagtactacaagccaaacatggtgaccggcgatgaaaatgaacgggatgtcatggaaaagttgctgcgcgaggagaaggcaaatgatccgaagaagatacactacttttttacagcctcacgcgccatgccgggcaagttcctgctgtcctatctgcccaagacgaaggtgcgtcacgagtatgtgacggtcatgccggagggctatcgtttccgtggccagattttcgatacggttaacagtctgctgcgttggtttaaggaacactggctggatccaacggccacgccggccagcgcctcggcgtccaacttaacgccactgcacttgatgcgtccgccgccgacgatctcgtcgtcatcccagacctccttgggcccccaggcgccatacagcgtcactggcagcgtgactggtggaacgccgcgtagtggcatcagcagtgccgttggcggtggcggttccagcgcctactccattacgcaatccatcactggctacggcacgtcgggcagttctgctccaggggctggagtatcttcctcccactatggcagctcatcgacgccgtcgtttggcgccatcaatacgccatacacgcccagtggacagactccgttcatgacgccctacacgccgcatgcctcacagacgcctcgctatggtcacaatgtgcccagtcccagctcgcaatcctcgagcagtcagaggcatcactacggcagcagttccggaacgggcagcacgcccaggtatcatgatatgggaggaggaggcggtggcggcgttggtggtggtggtggttccaatgcctacagcatgcagccgcatcaccagcaacgtgccaaagagaacctcgactggcagctggccaacgatgcctgggcaagacgcagaccgcagcagcatcagtcacatcagtcgtatcacgcccagcagcagcatcatcactcgcagcagcaaccccatatgggcatgagcatgaacatgggcattacaatgtcactgggacgtggcaccggtggcggcggaggcggtggctatggatcgacgcctgtcaatgattacagcaccggaggcggtcataatcggggtatgtcctcgaaggcgtctgtgcgcagtacgccgcgcaccaacgcctcgccgcactccatgaatctgggcgatgccacgcccctctacgacgagaactag

SEQ ID NO: 67 - protein, 1831 aa, Drosophila melanogaster
MAEFLDSEAEESEEEEELDVNERKRLKKLKAAVSDSSEEEEDDEERLREELKDLIDDNPIEEDDGSGYDSDGVGSGKKRKKHEDDDLDDRLEDDDYDLIEENLGVKVERRKRFKRLRRIHDNESDGEEQHVDEGLVREQIAEQLFDENDESIGHRSERSHREADDYDDVDTESDADDFIVDDNGRPIAEKKKKRRPIFTDASLQEGQDIFGVDFDYDDFSKYEEDDYEDDSEGDEYDEDLGVGDDTRVKKKKALKKKVVKKTIFDIYEPSELKRGHFTDMDNEIRKTDIPERMQLREVPVTPVPEGSDELDLEAEWIYKYAFCKHTVSEQEKPESREKMRKPPTTVNKIKQTLEFIRNQQLEVPFIAFYRKEYVKPELNIDDLWKVYYYDGIWCQLNERKRKLKVLFEKMRQFQLDTLCADTDQPVPDDVRLILDSDFERLADVQSMEELKDVHMYFLLNYSHELPRMQAEQRRKAIQERREAKARRQAAAAENGDDAAEAIVVPEPEDDDDPELIDYQLKQASNSSPYAVFRKAGICGFAKHFGLTPEQYAENLRDNYQRNEITQESIGPTELAKQYLSPRFMTTDEVIHAAKYVVARQLAQEPLLRKTMREVYFDRARINIRPTKNGMVLIDENSPVYSMKYVAKKPVSDLFGDQFIKLMMAEEEKLLEITFLEEFEGNACANGTPGDYVEESKALYQLDQFAKHVQEWNKLRAECVQLALQKWVIPDLIKELRSTLHEEAQQFVLRSCTGKLYKWLKVAPYKPQLPPDFGYEEWSTLRGIRVLGLAYDPDHSVAAFCAVTTVEGDISDYLRLPNILKRKNSYNLEEKAQKLADLRKLSDFIKMKKPHIVVIGAESRDAQNIQADIKEILHELETSEQFPPIEVEIIDNELAKIYANSKKGESDFKEYPPLLKQAASLARKMQDPLVEYSQLCDADDEILCLRYHPLQERVPREQLLEQLSLQFINRTSEVGLDINLMVQNSRTINLLQYICGLGPRKGQALLKLLKQSNQRLENRTQLVTVCHLGPRVFINCSGFIKIDTSSLGDSTEAYVEVLDGSRVHPETYEWARKMAIDAMEYDDEETNPAGALEEILESPERLKDLDLDAFAVELERQGFGSKSITLYDIRNELSCLYKDYRTPYTKPSAEELFDMLTKETPDSFYVGKCVTAMVTGFTYRRPQGDQLDSANPVRIDSNESWQCPFCHKDDFPELSEVWNHFDANACPGQPSGVRVRLENGLPGFIHIKNLSDRQVRNPEERVRVSQMIHVRIIKIDIDRFSVECSSRTADLKDVNNEWRPRRDNYYDYVTEEQDNRKVSDAKARALKRKIYARRVIAHPSFFNKSYAEVVAMLAEADQGEVALRPSSKSKDHLTATWKVADDIFQHIDVREEGKENDFSLGRSLWIGTEEFEDLDEIIARHIMPMALAARELIQYKYYKPNMVTGDENERDVMEKLLREEKANDPKKIHYFFTASRAMPGKFLLSYLPKTKVRHEYVTVMPEGYRFRGQIFDTVNSLLRWFKEHWLDPTATPASASASNLTPLHLMRPPPTISSSSQTSLGPQAPYSVTGSVTGGTPRSGISSAVGGGGSSAYSITQSITGYGTSGSSAPGAGVSSSHYGSSSTPSFGAINTPYTPSGQTPFMTPYTPHASQTPRYGHNVPSPSSQSSSSQRHHYGSSSGTGSTPRYHDMGGGGGGGVGGGGGSNAYSMQPHHQQRAKENLDWQLANDAWARRRPQQHQSHQSYHAQQQHHHSQQQPHMGMSMNMGITMSLGRGTGGGGGGGYGSTPVNDYSTGGGHNRGMSSKASVRSTPRTNASPHSMNLGDATPLYDEN

SEQ ID NO: 68 - DNA, 6021 bp, Drosophila melanogaster
  CDS (1)..(6021): CT13424
atgaatgatttacgtcagcagcagatggtagcagcgacatcgtcatcaggatcggaatcgggaacagcggtagaatcggcagccgccacgtccacagcaggatcagccggagcagcaggtcgcccccagtctaactgtagcgctaatagcaacgccaagtcagtggcagcgagcagcacgagcgaggaggagcagcgagttagctccacgtcgtcgccagcccagcgggatcagcagctgaatgcagatcgggaccgggaacaggagccagagccacagcagcagcagcagcgggaggaggcactgcagcaccagcataatcagcccggccatataaccagcaccacagcgtcgcctccgccgacgctgccaccgccgacgacgccgtgcgacgatgccccaagcacaactggagcatctgcatcggccagctcagcatccggagaagcaccatcagcagcatcagcagcgggagcagcaggtggaccgatggccgctacggcgcttgaggtagagagcgaggagcgggatggacataagatcatcctgaagctctccaagcacgccaatcccaactcaaacgcaaatgaatctcagccgggcggagatgagaggcgcgtggagcccctgcgcattcagctgccctgcggcggagcggaaggaggcttggttgcgaagcagcaagatgccttcgatgcggacgcctcttcctgctcctcgtcgtgcgccgaggacgaggtggctaccaccctcggccaacaactacgaaacaccccgcacattgtgccaaagctgaccatccgcgccgcgaacgagaggcgcgtaggcagcgtggtgcctaagctgaccatcaagttgcctgagaatccggctgcttccggctccaactccaactctggatcgtgctcagcagctgtgagtggcgcccagtcagctatgcccgccaagaacgatgcccacctgtccagcctctcgcccgcatccgcctcgtcttcatctgcctcgtcctcctcctcatcgtcgtcgtcgtcctcactggcggagatgcagacggtgcccaagctgatgatcaagacaacgctagccggtagtagctgcatcagcagcagtgaggagcttccgcagcagcagcagcagataccaaagttaacaatcaagacaggtggcggcggtcaggagcacgtgcacacggtcataatgacgcacgacctaaacaacgcccagagcatccccaaactcaccattaaaaccaaatccatagagatgatcgaggacgaacaggcggctaagctggagcagcaattgcagccgctgcccaagctgaccatcaagaacttatgctcaccgaagcacaaggtgcgtgcagtgctcgaggagaagccaccaacggcggcctccaagctggctatcccaaaacccacgcccaatcccacgccggctcccatgacgaatggcggcgagtcgaacagcagtagtcaggaattctgcggcttctccgacccagacgcagatatagctgcgccagcctcggacgacgttcgccgcaattcggacgacatggtgatcgacgattcgctctccaaggagcacgatcccaagatttttcacaatctaccgcccatgcccgccagcaacggcatagccagcggtgggagtaaggccagtaaagccagcaagtctgcccaatcccagcacaacgttgtggacatggtggacctgacctcgtcaccgtcgccgggctcttcgccaacgcatgtgcctaacaacttcacgggacgcatttcgccgaaagggttgctcatcgactgcctgcggatgcaaactgcgatcggctgttatgtgcccgaggaggccgacagtcgcgttaggccagctgcgtcgcccaattcgaacatattgcttagccagctgacggcaccggctaaaagcttcacaacgaccacgcctaaaagcaaatccagcaagtatccccagctaacggagcgcctgatggcgaatggaagcggtaccggtgggggatctgttattgctgcagaaagcgaggcagtcgttggtcccttgcccgccgcgaatcccgcccaatccataatcgagtccattgaaatcctggacacgcctgatggcagcccgagggtagcctacatggacgaggattctaacccgatgctcaacaaacatctccaaactattcacaagctcgcaatggatcacggagtggaacagcgtatggatacccaggacaacaacaacgagaaccacttgaaacgcactaacagcgagggaaacgaatctcccagcagtagactccctcccagcaaacagcgacgtctggacaacgacgagaacgaccagcagacgcagaattgccacgatcccgccagaaagtgcagtgaatcactgcaggcgcttccgccgtcacatcgctcgcgcaagcagaagcacgagcgaatcctgaacacagatctggagggttcgctttttccacccacccaacagcagtcgatttcaacgccggatcaaaatggagccttgtcctcggaggtcgaaggcgaggacgcaaaggcgcaagatccgctagaaccggcgacgcctcagcccccaccggtagcgacgccggcaggaacgggcaagaagcgtgggcggccgaagcgtatccaaaaccagagctcgccggatggtggaggtgcagttactcccaaacccggcactccacaggaggaggccaacagcgctgtcaagtcgcgtcgcgtacaactgctgcgcaagcgactggccatcgacatggtgagcgtgggccaagagcaggcggacatgaaagctaaggaaaaggagtcgtctgtgggcgtgccaaatgcaagagttgaagacgggcttgccgaaactctggaatctccaaagactcgcgaccatcgccccctgagagccacgcgccgcaccacgaccagcacaaacaccaacctgcagcccacgcccaagtccacaaggaagcgccagagcaaggccagtgtccaacaaagccagttgccgccgccgacgatggctcagttcggtagttcggagtccgagtccaacaacaacaataatagcagcatatcctttgccctgagcgcgcagatcgacctcacaatgtgctcgtccagttcgtcgacctcctctggcgctgccgccaaccagcaggtgatcggtggaagtggcagcagctcgatgctacctccgacgacgattctgtcttcttcggatccgctgcccgatgtcatcttccagccaaatgacttctcctctatcatggccacccagcagctgcgctcctcgcgcccctcaagcatcagctgtggcagtaccggcggtagccagccggactgtcacgacgaggacaactacaccagcgcgctggacaattccggagacgaaactgcgttgcctatgccccccacgcggggacgtggtcgtggccggcgatccaggggaggccgcggtagaggatcttcttcggtggatcgggctgtcagcgtcggaggcacagcctccacaacgcccgccacgcagcctagggccccgcgaatgagccgaggagcaagtgccgtagcaaaggccatcgccatgagtcgaccacgatgcgtgggcggcctcaagcaccagcccgatcccgagagacttaaaggcttgttcagtccgtcgccgcaagtgtttgaggaggacacgcgtatgagcgccgatcttagcaacagcaatcagtcgatggccagcctgatggaacccccgctaacgccacagaagcaacccgacttcctcaacaacgaggagtcacagtcgtccatggtgagcaatgtgagcatgatggactccaaccagggtcagtccgccgacgcgattctgggttctgctctcaaacgtccaaagaagaagaagatggaaacttgcgtggccgaagacaccgactacagcgcctccagcatcgccgagtacgactggccaccgcctaaaggttgctgcccatcaaagaatcgggacaccttcatgattcaagagcaggtggcgctctatctgggcattaccagctttaagcgcaagtacccggatctgccacgccgatcggtcgacatggaggagcgcaattggctgcaggagaaggggctggttagcgagaagttgtgcgacctgggcatcaccgctgtgtgggcctccgacatattggacatcatgtacgcggactttttcgacaagtacgaagagtacaaggagtacattcgcagaaagcatttgcgcgagatcgaggctaagcagaaggccctaggactcacagtcggggccggacgaggtctgcaagctcgcgaccgtgccatgctttcggccaccaagtggaacgcttacttcaacaagtcccgtaaggatgagcgccagtcctgcatggacctgcagaccttcacgataaatcagccgcagccaaggaccgcgcccacctgtacacgcctagagcgctccacttcggatttgatacgggcagtggcagaagaggcgaatatcccggcaccgcctaatctcctgccaccccgcgactatgacgaggccttccgcaactcagactacgcttatccactcacggtggtaccggaccagttctcaatggcctaccgccagtttgagcccgccgagctcagagcctacccactggacacggcgctggacaagccgccgaccgatctgatggctcagctgctacaggcaaaatccgaagctgtaggcagcgatgaaatcaaaacgtccgccccggcccccaaggatctggggcaagagcagtccgccatcaaatccgtaacggtaacggcgcccgtccgacgcagcagaaggtccacacgccagcagacggacaaggttcgcacggctagcagctccagcacgtcctccgctcaatcggtctcatccgcgtccagcggcaacgggagcagcagtgatacggaaagcggcgatgaaagcgactttagcagcacatcgagctgcagcagttcgacgggtgcctcaagtggagcaggcagcgaggacgaggatgggaacgagtgctcatcgtcggtcaggctgtccacctgcggcgtctgtctgcgcagtcagcatcgcaatgctagggacatgccggaggctttcatccgctgttacacatgccgaaagcgcgtccatcccagctgcgttgatatgccaccgcgcatggtgggtcgcgtgaggaactacaattggcagtgcgccgggtgcaaatgctgcatcaagtgccgtagcagccaacgtccaggaaagatgctctattgcgagcagtgcgaccgaggctaccacatctactgcttgggcctcaggacagtcccagatgggcgctggagctgtgagcgctgctgtttctgcatgcgatgcggggccaccaagccggagggtctgccccaggtggccgctctgtcccaggcgtccggaggaccgtcggccaacggggatcgctcaaaggcagcgcgcaataagcgcttgaaatgggtgcacgagtaccgcatcgatcatgtgacgaagatccgggagcacgccgccatgttctgcgtaccatgtgcgcgaaacaagcccgccaagcggcagtcggcggcgggtgcggccggtgcggcagcagttactcctgtcttggaggccacttccgcgcaaacggatgacagtccgatgcccagtcccggcctgacaaccaacggaggacgcgccctttcgccaacggcggcactgagtccaaaggcagctgtgcccgtggcatcgctgccgcccgttcttgaagcgacgacggtgaccacaaatattgcgggaacgataggcagacggcaggcgggtaatgctgtcaatattacaacgatgcagtgcagcagcagcagcagcagcaacttcagcgggaacggagtcaccgaggacgcggcgaatgtcactgcaacgggaacggctacggcggccgcaggagcacccgctgccactccaataggcatagctccgccgcccgttgttgcctaa

SEQ ID NO: 69 - protein, 2006 aa, Drosophila melanogaster
MNDLRQQQMVAATSSSGSESGTAVESAAATSTAGSAGAAGRPQSNCSANSNAKSVAASSTSEEEQRVSSTSSPAQRDQQLNADRDREQEPEPQQQQQREEALQHQHNQPGHITSTTASPPPTLPPPTTPCDDAPSTTGASASASSASGEAPSAASAAGAAGGPMAATALEVESEERDGHKIILKLSKHANPNSNANESQPGGDERRVEPLRIQLPCGGAEGGLVAKQQDAFDADASSCSSSCAEDEVATTLGQQLRNTPHIVPKLTIRAANERRVGSVVPKLTIKLPENPAASGSNSNSGSCSAAVSGAQSAMPAKNDAHLSSLSPASASSSSASSSSSSSSSSSLAEMQTVPKLMIKTTLAGSSCISSSEELPQQQQQIPKLTIKTGGGGQEHVHTVIMTHDLNNAQSIPKLTIKTKSIEMIEDEQAAKLEQQLQPLPKLTIKNLCSPKHKVRAVLEEKPPTAASKLAIPKPTPNPTPAPMTNGGESNSSSQEFCGFSDPDADIAAPASDDVRRNSDDMVIDDSLSKEHDPKIFHNLPPMPASNGIASGGSKASKASKSAQSQHNVVDMVDLTSSPSPGSSPTHVPNNFTGRISPKGLLIDCLRMQTAIGCYVPEEADSRVRPAASPNSNILLSQLTAPAKSFTTTTPKSKSSKYPQLTERLMANGSGTGGGSVIAAESEAVVGPLPAANPAQSIIESIEILDTPDGSPRVAYMDEDSNPMLNKHLQTIHKLAMDHGVEQRMDTQDNNNENHLKRTNSEGNESPSSRLPPSKQRRLDNDENDQQTQNCHDPARKCSESLQALPPSHRSRKQKHERILNTDLEGSLFPPTQQQSISTPDQNGALSSEVEGEDAKAQDPLEPATPQPPPVATPAGTGKKRGRPKRIQNQSSPDGGGAVTPKPGTPQEEANSAVKSRRVQLLRKRLAIDMVSVGQEQADMKAKEKESSVGVPNARVEDGLAETLESPKTRDHRPLRATRRTTTSTNTNLQPTPKSTRKRQSKASVQQSQLPPPTMAQFGSSESESNNNNNSSISFALSAQIDLTMCSSSSSTSSGAAANQQVIGGSGSSSMLPPTTILSSSDPLPDVIFQPNDFSSIMATQQLRSSRPSSISCGSTGGSQPDCHDEDNYTSALDNSGDETALPMPPTRGRGRGRRSRGGRGRGSSSVDRAVSVGGTASTTPATQPRAPRMSRGASAVAKAIAMSRPRCVGGLKHQPDPERLKGLFSPSPQVFEEDTRMSADLSNSNQSMASLMEPPLTPQKQPDFLNNEESQSSMVSNVSMMDSNQGQSADAILGSALKRPKKKKMETCVAEDTDYSASSIAEYDWPPPKGCCPSKNRDTFMIQEQVALYLGITSFKRKYPDLPRRSVDMEERNWLQEKGLVSEKLCDLGITAVWASDILDIMYADFFDKYEEYKEYIRRKHLREIEAKQKALGLTVGAGRGLQARDRAMLSATKWNAYFNKSRKDERQSCMDLQTFTINQPQPRTAPTCTRLERSTSDLIRAVAEEANIPAPPNLLPPRDYDEAFRNSDYAYPLTVVPDQFSMAYRQFEPAELRAYPLDTALDKPPTDLMAQLLQAKSEAVGSDEIKTSAPAPKDLGQEQSAIKSVTVTAPVRRSRRSTRQQTDKVRTASSSSTSSAQSVSSASSGNGSSSDTESGDESDFSSTSSCSSSTGASSGAGSEDEDGNECSSSVRLSTCGVCLRSQHRNARDMPEAFIRCYTCRKRVHPSCVDMPPRMVGRVRNYNWQCAGCKCCIKCRSSQRPGKMLYCEQCDRGYHIYCLGLRTVPDGRWSCERCCFCMRCGATKPEGLPQVAALSQASGGPSANGDRSKAARNKRLKWVHEYRIDHVTKIREHAAMFCVPCARNKPAKRQSAAGAAGAAAVTPVLEATSAQTDDSPMPSPGLTTNGGRALSPTAALSPKAAVPVASLPPVLEATTVTTNIAGTIGRRQAGNAVNITTMQCSSSSSSNFSGNGVTEDAANVTATGTATAAAGAPAATPIGIAPPPVVA

SEQ ID NO: 70 - DNA, 831 bp, Drosophila melanogaster
  CDS (1)..(831): CT14932
atgtcgacgacagcgcttgggatcagcgccctcttcatggtgggctgctgtgctctggcccaaattgcccgtgtgatcagccggcgactggtgacccgtgagggcttggtacccatcctgatcaacgaggccatcgccgccgccgagctgtgcgcctgctgtttcgagctcattattgtggccgacaactttggcgtgtccatgtacgccgtctgcctgttcctgctgaccatctggtggggacgcgtgtggggcgacgcttccgcctgcccgtacacacacatggaggacgtggtggagggtcgcaccagcttcaaggagatggctctgcgcagctgggccgagctgatgggcggctgttgtgtgtatcgcgtggtgcaggtcttctggtggctggagctggccgagacccatcgtggacgagcgtttgaggcgtgcaatgccgatatgcaggtcagcccatatctgggtgcggtcatcgagggcgtggccacgctgctgtgccgcctggcctcgaagacgatcagcgagaaggagccacggttcgggagctacatcgactcattcatcggcaccagcctagtcgtggcagtttacgcctttaactatgtcctgcttgcagccttcaacttctccggcggctacttcaatcccgtcctggccaccgccctcaagtggggctgtcgcggtcacacccacctggagcacatcattgtctattggatcggcgcctgtgccggcgccgtgctctccattccggtcttcaaggtgcccgcggtgcgacgccttctgctcggcgagggagcggcgtcgaagtccaagcaggaataa

SEQ ID NO: 71 - protein, 276 aa, Drosophila melanogaster
MSTTALGISALFMVGCCALAQIARVISRRLVTREGLVPILINEAIAAAELCACCFELIIVADNFGVSMYAVCLFLLTIWWGRVWGDASACPYTHMEDVVEGRTSFKEMALRSWAELMGGCCVYRVVQVFWWLELAETHRGRAFEACNADMQVSPYLGAVIEGVATLLCRLASKTISEKEPRFGSYIDSFIGTSLVVAVYAFNYVLLAAFNFSGGYFNPVLATALKWGCRGHTHLEHIIVYWIGACAGAVLSIPVFKVPAVRRLLLGEGAASKSKQE

SEQ ID NO: 72 - DNA, 1851 bp, Drosophila melanogaster
  CDS (1)..(1851): CT23511
atggccgccgttgccggcctctatggccttggggaggatcgccagcaccgcaagaagcagcagcaacagcagcagcaccagaaggagcagctcgagcagaaggaggagcaaaagaagatcgccgagcggaagctgcagctgcgggagcagcagctccagcgcaactccctcgatggttacgggtctttgcccaaattgagcagtcaagacgaagaagggggggctggtcatggctttggtggcggaccgcaacactttgaacccattcctcacgatcatgatttctgcgaaagagtcgttataaatgtaagcggattaaggtttgagacacaactacgtacgttaaatcaattcccggacacgctgcttggggatccagctcggagattacggtactttgacccgcttagaaatgaatatttttttgaccgtagtcgaccgagcttcgatgcgattttatactattatcagagtggtggccgactacggagaccggtcaatgtccctttagacgtatttagtgaagaaataaaattttatgaattaggtgatcaagcaattaataaattcagagaggatgaaggctttattaaagaggaagaaagaccattaccggataatgagaaacagagaaaagtctggctgctcttcgagtatccagaaagttcgcaagccgccagagttgtagccataattagtgtatttgttatattgctatcaattgttatattttgtctagaaacattacccgaatttaagcattacaaggtgttcaatacaacaacaaatggcacaaaaatcgaggaagacgaggtgcctgacatcacagatcctttcttccttatagaaacgttatgtattatttggtttacatttgaactaactgtcaggttcctcgcatgtccgaacaaattaaatttctgcagggatgtcatgaatgttatcgacataatcgccatcattccgtactttataacactagcgactgtcgttgccgaagaggaggatacgttaaatcttccaaaagcgccagtcagtccacaggacaagtcatcgaatcaggctatgtccttggcaatattacgagtgatacgattagttcgagtatttcgaatatttaagttatctaggcattcgaagggtttacaaatattaggacgaactctgaaagcctcaatgcgggaattaggtttacttatatttttcttatttataggcgtcgtactcttctcatcggcggtttattttgcggaagctggaagcgaaaattccttcttcaagtccatacccgatgcattttggtgggcggtcgttaccatgaccaccgttggatatggtgacatgacgcccgtcggcttctggggcaaaattgtcggctctttgtgcgtggtcgctggtgtgctgacaatcgcactgccggtaccggttatcgtcagtaatttcaattacttctatcaccgcgaagcggatcgggaggagatgcagagccaaaatttcaaccacgttacaagttgttcatatttacctggtgcactaggtcaacatttgaagaaatcctcactctccgaatcgtcgtcggacataatggatttggatgatggcattgatgcaaccacgccaggtctgactgatcacacgggccgccacatggtgccgtttctcaggacacagcagtcattcgagaagcagcagctccagcttcagctgcagctgcagcagcagtcgcagtcgccgcacggccaacagatgacgcagcagcagcagctgggccagaacggcctaaggagcacaaatagtttacagttaaggcataataacgcgatggccgtcagtattgagaccgacgtctga

SEQ ID NO: 73 - protein, 616 aa, Drosophila melanogaster
MAAVAGLYGLGEDRQHRKKQQQQQQHQKEQLEQKEEQKKIAERKLQLREQQLQRNSLDGYGSLPKLSSQDEEGGAGHGFGGGPQHFEPIPHDHDFCERVVINVSGLRFETQLRTLNQFPDTLLGDPARRLRYFDPLRNEYFFDRSRPSFDAILYYYQSGGRLRRPVNVPLDVFSEEIKFYELGDQAINKFREDEGFIKEEERPLPDNEKQRKVWLLFEYPESSQAARVVAIISVFVILLSIVIFCLETLPEFKHYKVFNTTTNGTKIEEDEVPDITDPFFLIETLCIIWFTFELTVRFLACPNKLNFCRDVMNVIDIIAIIPYFITLATVVAEEEDTLNLPKAPVSPQDKSSNQAMSLAILRVIRLVRVFRIFKLSRHSKGLQILGRTLKASMRELGLLIFFLFIGVVLFSSAVYFAEAGSENSFFKSIPDAFWWAVVTMTTVGYGDMTPVGFWGKIVGSLCVVAGVLTIALPVPVIVSNFNYFYHREADREEMQSQNFNHVTSCSYLPGALGQHLKKSSLSESSSDIMDLDDGIDATTPGLTDHTGRHMVPFLRTQQSFEKQQLQLQLQLQQQSQSPHGQQMTQQQQLGQNGLRSTNSLQLRHNNAMAVSIETDV

SEQ ID NO: 74 - DNA, 348 bp, Drosophila melanogaster
  CDS (1)..(348): CT32757
atgggttgcacctgctgtgacaataaacccaagccggagaccattgagatatattcggtgaaaatccgtgagaatggtacatacaagttgatcaagatgcaattggcggatatttggagtcacggatgggagctgcgtatcaataactttgccgacaaggaaaaggtgccgcacaacgagaaggatattcgcaatcaggtgtcggtggcgcgcaaagccaaacagagtctgtggaacaataataagcattttgtgtactggtgccgctacggaagtcgtcagcaggatctgcgaaagcgacaggtaacgacgagtgccaatcacgtgctgctgcacctgatcaattaa

SEQ ID NO: 75 - protein, 115 aa, Drosophila melanogaster
MGCTCCDNKPKPETIEIYSVKIRENGTYKLIKMQLADIWSHGWELRINNFADKEKVPHNEKDIRNQVSVARKAKQSLWNNNKHFVYWCRYGSRQQDLRKRQVTTSANHVLLHLIN

SEQ ID NO: 76 - DNA, 1254 bp, Drosophila melanogaster
  CDS (1)..(1254): CT33237
atgctggcagatgatgagtcgctgcagggcatcaacgattccgagtggcagctcatgggtgatgacattgacgacggcctactggacgatgtcgatgagacactgaagcccatggagaccaagtccgaggaggaagacttgcccactggcaactggttcagccagagtgtccatcgcgttcgccgttccataaaccgtttatttggttccgacgacaatcaggaacggggacgacgacaacagcgtgagcggtcgcaaaggaatcgcgatgcgattaatcggcaaaaagaactgcgccgcagacaaaaggaggaccacaaccgctggaagcaaatgcgaatggagcgacaactggagaaacagcgcttggtcaaacggaccaatcatgttgtcttcaaccgcgccaccgatcctcgcaagcgggcatcggacctttacgacgagaacgaggcatccggctatcacgaggaggatacaactctctatcgtacctacttcgtcgttaacgaaccttatgacaacgaatacagagatcgagaaagcgtacagttccagaacctgcaaaaacttctggacgatgatctgcgcaacttcttccacagcaactacgaaggtaacgatgacgaggagcaggaaattcgcagcacactggagcgcgttgaaatagagctgcccacttcggtcaacgactttggaagtaagttgcagcagcaactgaatgtctataatcgtatcgaaaacttgagcgccgctaccgatggcgtattttccttcactgaatctagtgatatcgaggaagaggcaatcgatgttacattgccccaggaagaggttgagggctctggtagcgatgactccagctgtcgtggagacgccaccttcacctgtccccggagcggaaaaaccatttgcgatgaaatgcgctgcgatagagagatccaatgtcccgatggcgaggacgaagagtactgcaactatccaaatgtttgcactgaagatcagttcaagtgcgacgataagtgtctggagctcaaaaaacgctgcgatggaagtatcgattgtctggatcagaccgacgaggctggctgcattaatgcgccagaaccagaaccagagcctgaaccagagccagagcctgaaccggaatctgaaccagaggccgaacccgaacccgaacctgagcctgagcctgagtctgaaccagaacaagaacctgaaccccaagtcccggaagccaatggtaagttctattaa

SEQ ID NO: 77 - protein, 417 aa, Drosophila melanogaster
MLADDESLQGINDSEWQLMGDDIDDGLLDDVDETLKPMETKSEEEDLPTGNWFSQSVHRVRRSINRLFGSDDNQERGRRQQRERSQRNRDAINRQKELRRRQKEDHNRWKQMRMERQLEKQRLVKRTNHVVFNRATDPRKRASDLYDENEASGYHEEDTTLYRTYFVVNEPYDNEYRDRESVQFQNLQKLLDDDLRNFFHSNYEGNDDEEQEIRSTLERVEIELPTSVNDFGSKLQQQLNVYNRIENLSAATDGVFSFTESSDIEEEAIDVTLPQEEVEGSGSDDSSCRGDATFTCPRSGKTICDEMRCDREIQCPDGEDEEYCNYPNVCTEDQFKCDDKCLELKKRCDGSIDCLDQTDEAGCINAPEPEPEPEPEPEPEPESEPEAEPEPEPEPEPESEPEQEPEPQVPEANGKFY

SEQ ID NO: 78 - DNA, 1296 bp, Drosophila melanogaster
  CDS (1)..(1296): CT33996
atgtttgagccctatgtgaaaatcaagaaaaagcgaagtgtgaatgaaatctatgaaaatgagaatttagagcaacagcaacatcatcttcagcagcagcagcagcaacctgctaccagcgataattgttgctgcgagaacggcgagcctcagaatgcgcctgaagttgcaactgcaacggtagcggcaacatctgtggcagcaacatctgcggcagcaacagtcgccacaggagcagcggccagcagtagcagcagcggcaattgcagtcgcctgcagcaattgatatcgacgccaccagtattattgcgcagatcgtcgctgcaacagcagcagcaccagcaacagcaacaccacccacacacgccagcagcaacggcaacaccaccgcaacagcagcaacagcagcaagctgcgccttcggttttgcaacagcatttgggtcacctgaattacgaaagtggagcaactgcagcagcagcagcaacagcagcggctgcagcagcaacagtagcaaccagtagaagtggctcggcaacactggcgcagcatttggcaacacccagcaacatactgcaggcggcattcggcagcagcaacttgcaacacatactaacgcggtccgccccctcgccctcgtccagtgcgatttcctccaacaactgcagcagcgcctgtgcgggcaatacgcactacaacggtggcaatagcaacagtggcagtagcagcagcaacagcaatcaccacagcaacagcatcatcgccagccgcctgttcggagccgcctcctcctcatcctcctcgtcctcctcctccgcatcagcatcctcctcgtcggtggctgcctcatcctcttcgtcgtcacaccatctgcatagccatcattcggcgctgaccaactccataacgaatcgcatcaatcagtccatcaggcggcatctgaaccagcagcaacatcaccatcccctcagtgcatcctcgtcctccgcatcggcatctccatctgcatccacatcatcatcatcctcctatcagcaatcgtcggtacaacagcaacattataattgcgcccatcctgcacagcagcagcagcaccaccaccatcaccacagcagcagcagcagcagcagcagcagcagcagcagcagccatcatcaccacaacagcagcagcagcagcaacagcaacaatcaacagcaaccacaacaatctcctctgtgcctagtattattagttaaatgccccaattctaaggaattttgtaacgccgccgcaaatttctgtgataaaaggtaa

SEQ ID NO: 79 - protein, 431 aa, Drosophila melanogaster
MFEPYVKIKKKRSVNEIYENENLEQQQHHLQQQQQQPATSDNCCCENGEPQNAPEVATATVAATSVAATSAAATVATGAAASSSSSGNCSRLQQLISTPPVLLRRSSLQQQQHQQQQHHPHTPAATATPPQQQQQQQAAPSVLQQHLGHLNYESGATAAAAATAAAAAATVATSRSGSATLAQHLATPSNILQAAFGSSNLQHILTRSAPSPSSSAISSNNCSSACAGNTHYNGGNSNSGSSSSNSNHHSNSIIASRLFGAASSSSSSSSSSASASSSSVAASSSSSSHHLHSHHSALTNSITNRINQSIRRHLNQQQHHHPLSASSSSASASPSASTSSSSSYQQSSVQQQHYNCAHPAQQQQHHHHHHSSSSSSSSSSSSSHHHHNSSSSSNSNNQQQPQQSPLCLVLLVKCPNSKEFCNAAANFCDKR

SEQ ID NO: 80 - DNA, 582 bp, Drosophila melanogaster
  CDS (1)..(582): CT34671
atgtatgcgagttatggcctcgataagattagacgtttgccagcggcatttggcaacaacaaacagagcgcagacattccgccgcatggctgcggcaaaaattggtatttctgcgacactcttggccgtccgccggagattgttttgcccacttttacccaaaatgcacacaggaaataccggctaatcttatcgaaattccaagcgctaactgccgtgggaaagcttcgagatatatctttcggaatctacacaaagccgcagactttcgaggattgtgtgggcgatgagctgccaatgggctgggaggaatcctacgatccgaacatcggaccctactacatcaatcacctggcgcagagcacccaactggaggatccgcggcaggagtggaagactgtccaggagcagatgctcagtgactatctgtccgcggcgcaggatcaattggagaacaagcgcgagatgttcgatgtcaagcagcagcgactgctttgggcccaggaggagtacaatcatctgaaattggcagccagtcgaagcagtcttatctccgtgctgcgttgctgccgaattcgctaa

SEQ ID NO: 81 - protein, 193 aa, Drosophila melanogaster
MYASYGLDKIRRLPAAFGNNKQSADIPPHGCGKNWYFCDTLGRPPEIVLPTFTQNAHRKYRLILSKFQALTAVGKLRDISFGIYTKPQTFEDCVGDELPMGWEESYDPNIGPYYINHLAQSTQLEDPRQEWKTVQEQMLSDYLSAAQDQLENKREMFDVKQQRLLWAQEEYNHLKLAASRSSLISVLRCCRIR

SEQ ID NO: 82 - DNA, 549 bp, Drosophila melanogaster
  CDS (1)..(549): CT2591
atgagtggagctctcggagatgtggtgtccgaatacctggagcgcggcccagtgctcgtggtggcggacctccttagcctgataacggtctcgtcctgcctggtgatcaaggttccgcagataaacacgatacgggcgaacgagtcctcgaaaggcatcagtgttttgggactgtgcctggagctgttcagttatacggtgatgttgtcgtacaactacaccagtggctacgacttcctctcgtacatggagtatcctgttttgctgctgcaggagtacgccctgatttactacgccttcaagtaccaggatctgctgggaaggaggacgcaagtggtggccatactgtatagtatagtggccactctcatatacatgaagctctttcccattatcatccttaagttcctggtggtgactcgaatctacacggtgttcttccagtcccacgattggatgttgctatcaaacttcctgatttcgacgttccttagcgcctccgttttcaccgccgcttgcgtctacaagaagaaggccaaggcggagtaa

SEQ ID NO: 83 - protein, 182 aa, Drosophila melanogaster
MSGALGDVVSEYLERGPVLVVADLLSLITVSSCLVIKVPQINTIRANESSKGISVLGLCLELFSYTVMLSYNYTSGYDFLSYMEYPVLLLQEYALIYYAFKYQDLLGRRTQVVAILYSIVATLIYMKLFPIIILKFLVVTRIYTVFFQSHDWMLLSNFLISTFLSASVFTAACVYKKKAKAE

SEQ ID NO: 84 - DNA, 4791 bp, Drosophila melanogaster
  CDS (1)..(4791): CT35764
atgacgagcattaagaccgagatgccgcccctgcacgcggcagaggcgctcgcctccagcagtgctacagacagtggtgggggaggagcaggaggaggaggaggaggaggtggaggaggatcgggcggaccaggagcgggaggaacgggaggcgtaggcagtgcgcccgccacacccaatgccacaattagcgccgccgccgactccagtgataatcaacccggcacgccgcagcccacgcaacagcagcaatcgacgcagcaacagttgcagcagccacaatcgcaacagcagcagcagcaggccatgggtggaggagatccccagcagcagcaacagcagcagcaggtaacgggtatcacccaccagccgtacgccacccaccacatgtactccgcatctggcggacagcagcaacaacagcagcagatctacggcggactctacggcggggacatgcagcagcagcagggttacgccagcagctacatcaacagctacgagcagttctaccagcagcaacagcagcagcagcagggcactgattacgcctttggcaccgtgggcgttgactatggcaagagcgccggtgttcgctatcatccctacctgcagacgccaacctccggactgggaggcattccaacggccagctcggcacaggaggaggcgggcagtgcgcccagcgcggtcagcaccaccacagcggtggccatgagtccgcgtgtggttagcagcagcagtccaacgtcgacgtcctcgcacctgcagctgggcagctccagtggccagacaccaggctcaccaggcggagccgccggaagtgccggatgcaagttgcagtgcaagaagtgcggcatcctcaccaccaacgagtcggagctacaggagcacatcgccaacgtgcacggagagtcgccgtacggcagcagcggttacgccagttcaccgtacatcaaggaggagatgcccacaccacagccacccggcgttggatccgcaacggccaatcccggcgaattactcgacctagattcccagaagatggtctatcaccagcagctgctccagcagcaacaacagcaacacgacgtggtcgctggactgccgctgggcgctctgccggatccgctgcactcgatgcaatctatgcagcagcgcgcactccacagctgggagcagcagccacagcagacggtggcctccgtggagggcctgccaccctacatgcagcagggattgggcgtggggctgggagtcggtgtggacaagtcgccctactactcaccaaagcagtcaccctatcatcagtcaaccggcgttggcggagccacgctgatcaagcaggagtacggcggccacggactgatcaagtccgagtatcccgattcgcagcattacgtggacaagtccttcgatcccacagctggcggagctggtggcgcggaactgtgcgccagcgtggccaccagtccggcggagttccccagcaccactacgggcggaccagggcaggagggagcggcgggtgcggcgccaggaggtggataccgcggtttcgagccacccagctcgagctccgtgctgccggccaacagcctgacggccaaggcggccacctggaagtcgaacgaggcgcgccgtccgaaaacgtacaactgcacggcctgcaacaagtggttcaccagctcgggccatcttaagcgccactacaatacgacgctgcacaagaatgcggttaagtcgagcggccagccggatccagccaccctgcccatctcggcgcaccaccatcccgcccgcgacccggtgacgaagcccagtcgcaggggcaatgccgcagccgctgcggccgccgctgcagctgccgcctcggccagcggtcagggtcagcagcaacagccgccgataccgccgccgccggccaatgtgccacccccggagccgcctagaagtccgcccgattatggcggaggaggcggcttgggcgtgggagcgatgggcggcgctgccatgtcccagtactcggcctcaccctcgcccacacagcagcagcagcaccacctcaaccaccatcagcagcaggccaacggctatgctaatggcaccgccaacggctatggctacatgcagcaacaagtgcaatccacgacaaacgcttcaccacagcacgcttccaacaacaacagcaacaaccagcagcagcagcaacaacagcagcagcaccatcagcagcagatgccgcagcaccacaactccgttttgaacggtcacccaaacgggctagcaggtccctccgccccacacaacaacaacaccacccaaatgccgtcctcccaaatgaggggcctgctgaacgaaacaacaaccacgccgccaccaacaacaacaacccgagcaccacaaatcacaacaacagcaacaacaacaacaacggcggccaccacggtagctataaagagcgagcaaatggaggacagcaaccacactcacacccacacacacacgcatcccaatcacagtcacagccaggacaggagccacagcagcagcagcagcagctcaatggccacggaggaggcggaggagcaggagctgcgggatcaggagcaggcggacgatcacctgcatcagcatcaacaggcgtcgcagcagtatctgctgtcggcgcgtcattaccacagcagcacgcccaacacgctcagcagcagcaacaccaatcccagcacgcccagcagcaactcgccccatactatctaccggcaggagcagcagggaacggatttctcgcgcaccaccccgccgccgcagccgctgccgcctatgggaatgctgccgcctatggcaatggactacaacatgctggctttggatatgcccatgcccatgcccacgctcatgcacagcaatatgctgcagtgcagcagcaccagcaccacgccgctagctactaccatcaccaccagtatgccggacactatgcagccgccgcagcagcagctggtgcaccactaccaggcggtgctccacccgctccatcagcagctgggggagcagcaccagcgccaggaggcggatcatcatcagcagcagcgggagcttcaccaactggatcagcagcagcagcagcagcaggcgttaatcctggcggacagtttgccgcacagcagcagttcgcccaccagcagctccccaccgcccaccatgcccatgccgctcaccaccatcacagcgccgcagctgctgccgctgcagccgccgccgccgcacatcaccagcaccatgcccatgccgcccaccatgcacatgcccatcatgccgccgccgccgcaatgctaccagcagctgcagccgctggaccccacaatgagctatcacactattattggtagtggcccggaggcgcataccggaacggccggcggtggctatagcaatcagatcaccaccagcgatggccagatcctgcagctgatgccaacatccctgttcgcgccatatgcaccgctctcgccgtactcggtggccgcccagcgatcgccgcaggagggcgatctgccgccggttcacacactcacgacggccctgcatgcccatcagcagggcgggcagcaggaggcgcagacgccaacgctgactgtgctctccacgccctactcgcccacagtgagcagctcgcgggcgactcccgcactggagatggatatggccacgctgatgcagcaccatcaggactatgagatggagcagtaccagatgcagcaccagcagttggatcagatgcagcagcaccagcagcaactggaccaccagcagcagcaacagatcctggcggatcagacccagacgatggcccaacagccgctggccaagaagcggcgtggcggcaacgcaacaccatcgacgacgaagcgacggcggaacagcagcgtcggatcgacgtcgccgcactcgaccaccctgccatcgggacggatcaagtgtctggagtgcgacaaggagttcaccaagaactgctacctcacgcagcacaacaagagcttccactccggtgagtacccatttcgctgccagaagtgcggcaagcgctttcagagcgaggatgtctacaccacgcacctgggtcgccaccgcacccaggacaagccgcataagtgcgagctgtgccccaagcagttccatcacaagacggatctgcgccgacacgtggaggccatccatacggggctgaagcagcacatgtgcgacatctgtgagaagggcttctgtcgcaaggatcatctgcgcaagcacctcgagacgcacaatcggccgcgggtggtgggcaagaagtccgccgcggcagcagccgccgccgcagcagcagcagcagtcactgccacggcgggattgggaggtgcaccagccgccggttccattaaggcggcatttgcccgctcgctaacggtgacggctgtgagcagtgagccaggcgcaggagttgcaataccctcagctcctgccactgccacatgtgctcctgtatctgtatcagcgtcagctcttgtccaggccgtcaatcccagtctgacttccggcctcagtctgaagcggcacatcgacgatgtggccgttgacgatgacagcctgttggaggaggacgaggatgagatggagatggagatggagatggatatgttggaggaggaagatgaggaggaggaggagctgggcgatcaccacatgataatcaagagcgagtacgtgcaggaggagtttcagatgatcgagaagagcatagagctctactaa

SEQ ID NO: 85 - protein, 1596 aa, Drosophila melanogaster
MTSIKTEMPPLHAAEALASSSATDSGGGGAGGGGGGGGGGSGGPGAGGTGGVGSAPATPNATISAAADSSDNQPGTPQPTQQQQSTQQQLQQPQSQQQQQQAMGGGDPQQQQQQQQVTGITHQPYATHHMYSASGGQQQQQQQIYGGLYGGDMQQQQGYASSYINSYEQFYQQQQQQQQGTDYAFGTVGVDYGKSAGVRYHPYLQTPTSGLGGIPTASSAQEEAGSAPSAVSTTTAVAMSPRVVSSSSPTSTSSHLQLGSSSGQTPGSPGGAAGSAGCKLQCKKCGILTTNESELQEHIANVHGESPYGSSGYASSPYIKEEMPTPQPPGVGSATANPGELLDLDSQKMVYHQQLLQQQQQQHDVVAGLPLGALPDPLHSMQSMQQRALHSWEQQPQQTVASVEGLPPYMQQGLGVGLGVGVDKSPYYSPKQSPYHQSTGVGGATLIKQEYGGHGLIKSEYPDSQHYVDKSFDPTAGGAGGAELCASVATSPAEFPSTTTGGPGQEGAAGAAPGGGYRGFEPPSSSSVLPANSLTAKAATWKSNEARRPKTYNCTACNKWFTSSGHLKRHYNTTLHKNAVKSSGQPDPATLPISAHHHPARDPVTKPSRRGNAAAAAAAAAAAASASGQGQQQQPPIPPPPANVPPPEPPRSPPDYGGGGGLGVGAMGGAAMSQYSASPSPTQQQQHHLNHHQQQANGYANGTANGYGYMQQQVQSTTNASPQHASNNNSNNQQQQQQQQQHHQQQMPQHHNSVLNGHPNGLAGPSAPHNNNTTQMPSSQMRGLLNETTTTPPPTTTTRAPQITTTATTTTTAATTVAIKSEQMEDSNHTHTHTHTHPNHSHSQDRSHSSSSSSSMATEEAEEQELRDQEQADDHLHQHQQASQQYLLSARHYHSSTPNTLSSSNTNPSTPSSNSPHTIYRQEQQGTDFSRTTPPPQPLPPMGMLPPMAMDYNMLALDMPMPMPTLMHSNMLQCSSTSTTPLATTITTSMPDTMQPPQQQLVHHYQAVLHPLHQQLGEQHQRQEADHHQQQRELHQLDQQQQQQQALILADSLPHSSSSPTSSSPPPTMPMPLTTITAPQLLPLQPPPPHITSTMPMPPTMHMPIMPPPPQCYQQLQPLDPTMSYHTIIGSGPEAHTGTAGGGYSNQITTSDGQILQLMPTSLFAPYAPLSPYSVAAQRSPQEGDLPPVHTLTTALHAHQQGGQQEAQTPTLTVLSTPYSPTVSSSRATPALEMDMATLMQHHQDYEMEQYQMQHQQLDQMQQHQQQLDHQQQQQILADQTQTMAQQPLAKKRRGGNATPSTTKRRRNSSVGSTSPHSTTLPSGRIKCLECDKEFTKNCYLTQHNKSFHSGEYPFRCQKCGKRFQSEDVYTTHLGRHRTQDKPHKCELCPKQFHHKTDLRRHVEAIHTGLKQHMCDICEKGFCRKDHLRKHLETHNRPRVVGKKSAAAAAAAAAAAAVTATAGLGGAPAAGSIKAAFARSLTVTAVSSEPGAGVAIPSAPATATCAPVSVSASALVQAVNPSLTSGLSLKRHIDDVAVDDDSLLEEDEDEMEMEMEMDMLEEEDEEEEELGDHHMIIKSEYVQEEFQMIEKSIELY

SEQ ID NO: 86 - DNA, 3837 bp, Drosophila melanogaster
  CDS (1)..(3837): CT28931
atgggggaaagcgatgccgagagcgattcgagcagcaattccagcagcagcgacacttccagtggcagcgacagcgacgccaggagcgagtcctcgtcctccgaaagcagcgggcgcgaggaagaggaagcaaagcaggaggaatccgccaaagatgccaagaaaactgacgatacggataggggggagaagcgtgccaaggagagggatgctggacaggatgagcagcccactgagcagaagaaaactcctgcggctgagcctcgttcggagcgccagcacatttcccattctgctggcgtggaaaagcagcaagaagaagcagtagcagctgcggaggcggaaagcgagaaattaaatgaagcgaaaaaagttgaaacacctgtccagcggaaagaggaagcagaagcctcaagtgtgacgaaagagctgaacagcccgaaggcccaagaggaaaacgctgcacgggaattagaagagcggaggaaggatgaagagcagccagtgaccaccaatggaagtagcaaggaatcgccggtggaagcagcagctgaaacagtgaaacctcccactgcggaccacatcgaagagggcgagataaccgacaaagacgaagatgacctaccgactaaagaggaaaagaaagctgtcgcatctaagagtccacccaaagaaacccaacgaaaacaaagccgcagcccggatggcaaacgacgacgcccacgctcatccagcaggagtccatcacccagcagccgtcgtcgtcgtcgctcgagaagcaaaggcagcaggacccggagtcgcagtaaaagtccaatccgccgcagatccaattctttggagagaagacgcgttgagcgacagagacgtcatgaggagcgagataaacgcgatgaagagcgagccaaggagcgagaaaagcgccatcaaaagggcgaaccaaccagcagcaggcgtagagatgattcgagggaaaagaagaggtcgccagaacgcaaaagagatcgatcctcctccactccgaaatccaaatcctcaaagaccccacgccacaccgaaaccaccgaaactaatgcagacaatgaaaccgtaaccgaaccggcagccaaaataactgagcgccaacgaaagaccgtcgatgtgctgacatctcggactggaggagcctatattccgccggcgaagctgcgcatgatgcagtcacagatcacggacaaatcatccgctgcctatcagagaattgcttgggaggctctcaagaaatcgatccatggttacataaacaaagtgaatgtaacaaatatagccatcatcaccagagagcttctaagagagaatatcgtgaggggaaggggcttactaagcaggagcatcatccaagcccaggctgcttcgcccacattcacccatgtatacgccgctctggtgagcattataaattcaaagtttccgaacataggagagctcctcctcaaacgtctggtcatccaatttcgtagggcgttccgacgcaatgataagatggtttgcatgtcggccactcgattcattggccatttggttaaccagagggtggcacatgagattctggcactagaaatccttaccctgctggtggaaacgccaacggacgattctgtagaggtagccatcgcttttctgaaagagtgtggtatgaaactgactgaggtttcgtctaaaggcattggggccatcttcgagatgctgagaaacattctgcacgagggaaagttggacaagcgtgtacagtacatgattgaggtgctgtttcagattcgaaaggatggctttaaggatcatcaggctgttgttccggaactggagctcgttgaggaggacgatcagttcacacatctgatgatgctggatgaagccaccgaaacggaagatatactaaatgtttttaaatttgacgacaattatgccgaaaatgaggacaaatacaaaggcctaagtcgtgagatcctgggaagcgacgatggcagtagttcaggctcgggctccggatcagattcggatagtgattcggatggagaatccggatccgatgcggaaaagaaagccgaggctggcgacatcattgacagcactgaaaccaatctgattgccctgcgacgcacaatttacttaacaatcaactccagtttggattatgaggagtgtgctcataaactgatgaaaatgcaactgaaacccggacaagaaatcgagctctgtcacatgtttctcgattgctgtgcggaacagagaacatacgagaagttctacggactgctggcgcagcggttctgcaacatcaataagatctacataccgcccttcgaggagatttttaaggacacctatcaaaccacccacagattggacacaaatcgtttgcgaaacgtcagcaagttcttcgcccatctcctgtttacggacgccattagttgggatgtgctggagtgcatccaactgaacgaggatgataccacgtcatcgagccgcattttcataaaaatcctgttccaggagctagctgagtatatgggactgggcaaactgaatgccaagctgaaggatgatgttttggtagagagcatagctggtttgtttcccaaggataatccacggaatacccgcttctccattaactttttcacctcgattggtttgggtggtctcaccgacgatttgagaagattcctaaaaaacgcccccaaatctgtgcccgcaataaatgctgaaattctggccaatgccggggggaatcctttcagagatggctctgcacccgctggaaacaccaaggtggccccatcttcgtcctcctcgtcatcgtcgtcttcggacacggacagcgaagactccagtgaagaggacagcagttccgactcttctagtgaatcttcaagctccgattctagctcggaacccaaaaagaaacgcaaacgcaaggacaaggataaaaagaaatctaagaaagcgactaaagagaaaagaaaaagtcaagagagctcggattccagtggcagcgaagacagcgataagtccacctccgaatcatccgactcatcgaattcttccagcgatgaaagtgacgctgagcctcaggcgaagatcaagcgccaggagcatgtcgaaaaaaataagttccgaggaaggacccaagatagtgatgagtttaatttggaaggtcctggatccaaaaatcgctttcagccgaatggaaatggccagaggcgcagagataactcaactggcagagaacgaaaccgggagaattcttcgtacgacagagaaagaaacaggggaaattcttcgtacgatagagaacgaaagcgggggaattcttcatacgacagagaaagaaaccgagagagttcatacgataaagaacggaagaaccgaaatgcagttgcccacgatagacaacgaaaacgggatcgatcacgatcttatgaaagaccaacaataagagagaactccgctcctcgcgaaaagcggatggagagtagtcgcagtgaaaaagacagtcgtcgtggtgaccgttcctccagaaacgagagatcagatcgtggagagagatcggaccgcggagaaagatcagaccgtggagagagatcagaccgtggagagagatcagatcgtggagagagatcagatcgtggagagaggtcagatcgcgaaaaggaacgcagtcgtgccaaggagcgggaacgggatagggatcgtgatctgaagggacaacgggagcgtaaaagagagcgtgacgatggatcccgtgatcgttcgcgaagggagcgcagctcacgccgttccaagggacgcagctaa

SEQ ID NO: 87 - protein, 1278 aa, Drosophila melanogaster
MGESDAESDSSSNSSSSDTSSGSDSDARSESSSSESSGREEEEAKQEESAKDAKKTDDTDRGEKRAKERDAGQDEQPTEQKKTPAAEPRSERQHISHSAGVEKQQEEAVAAAEAESEKLNEAKKVETPVQRKEEAEASSVTKELNSPKAQEENAARELEERRKDEEQPVTTNGSSKESPVEAAAETVKPPTADHIEEGEITDKDEDDLPTKEEKKAVASKSPPKETQRKQSRSPDGKRRRPRSSSRSPSPSSRRRRRSRSKGSRTRSRSKSPIRRRSNSLERRRVERQRRHEERDKRDEERAKEREKRHQKGEPTSSRRRDDSREKKRSPERKRDRSSSTPKSKSSKTPRHTETTETNADNETVTEPAAKITERQRKTVDVLTSRTGGAYIPPAKLRMMQSQITDKSSAAYQRIAWEALKKSIHGYINKVNVTNIAIITRELLRENIVRGRGLLSRSIIQAQAASPTFTHVYAALVSIINSKFPNIGELLLKRLVIQFRRAFRRNDKMVCMSATRFIGHLVNQRVAHEILALEILTLLVETPTDDSVEVAIAFLKECGMKLTEVSSKGIGAIFEMLRNILHEGKLDKRVQYMIEVLFQIRKDGFKDHQAVVPELELVEEDDQFTHLMMLDEATETEDILNVFKFDDNYAENEDKYKGLSREILGSDDGSSSGSGSGSDSDSDSDGESGSDAEKKAEAGDIIDSTETNLIALRRTIYLTINSSLDYEECAHKLMKMQLKPGQEIELCHMFLDCCAEQRTYEKFYGLLAQRFCNINKIYIPPFEEIFKDTYQTTHRLDTNRLRNVSKFFAHLLFTDAISWDVLECIQLNEDDTTSSSRIFIKILFQELAEYMGLGKLNAKLKDDVLVESIAGLFPKDNPRNTRFSINFFTSIGLGGLTDDLRRFLKNAPKSVPAINAEILANAGGNPFRDGSAPAGNTKVAPSSSSSSSSSSDTDSEDSSEEDSSSDSSSESSSSDSSSEPKKKRKRKDKDKKKSKKATKEKRKSQESSDSSGSEDSDKSTSESSDSSNSSSDESDAEPQAKIKRQEHVEKNKFRGRTQDSDEFNLEGPGSKNRFQPNGNGQRRRDNSTGRERNRENSSYDRERNRGNSSYDRERKRGNSSYDRERNRESSYDKERKNRNAVAHDRQRKRDRSRSYERPTIRENSAPREKRMESSRSEKDSRRGDRSSRNERSDRGERSDRGERSDRGERSDRGERSDRGERSDRGERSDREKERSRAKERERDRDRDLKGQRERKRERDDGSRDRSRRERSSRRSKGRS

SEQ ID NO: 88 - DNA, 1551 bp, Drosophila melanogaster
  CDS (1)..(1551): CT32253
atggtgcggttaagtgcagcctggagctgctgttttttggccctgattgcgttggtatccactgtcgcctcctccgctgcggattatccgggtgtcatcgaactggtgggttatagcaatcgccgcgcacggacttacttccaagagcaaccccgctccaatcccaatcccaagccgggtttgacttcggccaaaacccgggcggatattgagaccgtgaagcggaatatccgtaaatacgatcgtttgctagagttggatacgaaaaatctgccagagcagcaaaaggatatgctcgccaggattgtggagcgagtggccaggctcaaggaatccctggacattgaggagcagcaatttaaccagcaggaagctacctcctccaggagcagtagtagtaccaccactagtgcatccagtactcaagaatcgcaaacagaagcggaaacggagctggatcaggagccgatcgagcagagcacacagctgcccactggagccaccgaagctgaaacggatcccaccctaatcctagacgaaactacgctgctggagctgcagaacacgatgaacgagcaggctgccatgagcaccataatgaaggaaatgcccacgaccacggatatgagtcagcaggaagcggaatcggaggtccccgacgaggagggagagaccacctcaccaaatctgaccacccaatcggaggcagcgacgaccagtgatgaatccctcaccgattccactgatcccgatgatcaattcgtagctgccagatcgaataacaatatagcggccataacggcagcggatgatgccgatggcaccaccacaaccaccgccaatacgggcagtcagcagcgcacgttgaccaccatgggaaaacttaagaatcgggccaccaagcgacccttcgcccacaaggtcaccgccgccctgaaacgaggaggtcagcgtccgagtagcgtgagtgcggcagctgcgagtgcggcagcggcctcaaaacccagtagcagcaccaccaccgccgccgccgccagcagcaccacccagaaacagaaattggccaccaacagtttccagcagaagcagcagcaagcgaagcccctgcaaaaggtcacaccttcgattggcggtggtggatcatccaacccgtcctcggcatccattccctcggctaccacgaattccgcagctccctccttgcctatcgagcaattgtatacccgtactccccaggccaatatcccattggcagcagcagcagcagcagcaacctcatccgcctcagcagcggcagcagcaggatcagcaggatcgggagccacaccagccacctacagcagccagcatgacagcatggtatacgatggacatgtcaatgcgtcggccttgatcgacagcctgaacacaaacgctcgggaggaatactaccagcagaaactaggagcaggcaacaaggataacaaggtaaggcatttaccacttacctatacttttggaaacttatctttttactattcgctaaaagctaaaagaccatttaaacgctaa

SEQ ID NO: 89 - protein, 516 aa, Drosophila melanogaster
MVRLSAAWSCCFLALIALVSTVASSAADYPGVIELVGYSNRRARTYFQEQPRSNPNPKPGLTSAKTRADIETVKRNIRKYDRLLELDTKNLPEQQKDMLARIVERVARLKESLDIEEQQFNQQEATSSRSSSSTTTSASSTQESQTEAETELDQEPIEQSTQLPTGATEAETDPTLILDETTLLELQNTMNEQAAMSTIMKEMPTTTDMSQQEAESEVPDEEGETTSPNLTTQSEAATTSDESLTDSTDPDDQFVAARSNNNIAAITAADDADGTTTTTANTGSQQRTLTTMGKLKNRATKRPFAHKVTAALKRGGQRPSSVSAAAASAAAASKPSSSTTTAAAASSTTQKQKLATNSFQQKQQQAKPLQKVTPSIGGGGSSNPSSASIPSATTNSAAPSLPIEQLYTRTPQANIPLAAAAAAATSSASAAAAAGSAGSGATPATYSSQHDSMVYDGHVNASALIDSLNTNAREEYYQQKLGAGNKDNKVRHLPLTYTFGNLSFYYSLKAKRPFKR

SEQ ID NO: 90 - DNA, 3684 bp, Drosophila melanogaster
  CDS (1)..(3684): CT32701
atggacacaggcgaggcgctgaagtcctggctgactgaaacgaacaagccgttcgcggcacgtgttgagttcgctctgaaggtatggcagtccgtggagttcccctacctcaataagtacgaggtcatcgccgactggctggcgaaatcattgggtgggtgcaaggatttacccttccaacaactcaaggatttcctgaggctgagggcgcagcctggctgggttactcagacaacgaaatgccagttgattcacgctctctacgagattgtctcccgggaggagaacgcaaacgagtcggcactggaagtcctgcccatggttctcagttctgagctgctccaggatgccttgcggtccagcaacaagcttctattcgaatgctatggcagcctgttcagatgccatcaaaagtgcgtcgaacttcgcaaggataacaaggatcggactgagagccaagaccactgggatgcagagtttgtagttcctgtgatcaagcagctgacagagatggttcgccgctctcaggagcctgaaaagcttttagaagagtacaattcgaaaactgttcgtcctcttgtggagctgcatctgaccttaaaaacttcatgcctagacgaactggccgagctggaaaagcaaatcaaggcggagtttgacatcacacggattaaggaccttccgctgcatgtcagcctgatccttttggaggctagtgtcctgaataatcgcttccaaacagctaacatcagcaccatcttactgtgtatatttaacacggaggcattatcgcagtcatcgcttcaactgaccgcccatttccttatgtcactgcgtaaatacaatgtatccctgcagtttaaattggaaaatctatcgatcaccgcgtttgcctatgtttctgatcagctgctgcgtttggtgcgcgagtacaagaagtccaacttaaaagaggttttaatacttctctgttctgcgttgcggtataatcctctcctgctggagcagagtgtttaccagataaccgtttggatgctcacgactcccaaggagaatgcccaagtggaggagctgtattcggagtaccttattctactgctggacatgtttcgccgtcttagtcgcgcagagcggttcatcatcaatctcctcaaggtcctaggagcatggttgggaaagtacactttggatgttccccctaatgaagctaagaagcgacgcatccaggactctaaaattattgaagctgaaggccatcagttggaggagcgctttctaggcataatttttaatagaacccctttagccacagctccttcggccaatgacgctttcaagcagctgtgccaaacgtggccaagccactcagccggtgtggctttcactcgtttaattagcaacctgatgagcaaaccatctctggtgatttggaaaagtctgttgcattccttcgcggagctgcttgaggaggatcagccgaaagaagtgctgcccgaaaacctggactttgctcgggaactgcatgctgcgctcctttgccaatacttaaacggcactcgactggctgagcaagtgcaactttatcagctgcaagtggagcaacaactacagcacacttgccaggtcctggagcagttcggacggcttttactacgccaagagcacaaccgccggcttatgaatgcctttctggagtgcactgagagagccagcggttttgagcttctattggcgtactactggccagatggtttccccgccagccagcggccagtccagctgaggggtttcctgcccaccgccgagtggacgttgatccagcaaagggtgtacaactttggcaagaactgctgccggctgagattgcagcgtttggagctgcagcttgttgagagtggttggttgctgaaggatcaaaggggagccaattgttcggatgccctggctgagttagtcccaccgtatcaactctttcggctttccagaccacagaagcagctccgtttgcatcaaaggaaacataatcaaagcttggaaccccatctaaatgattcggagagcattgagatccttacattgcagctgcttaaggaatatggagcagaggccaaagaagcgaaggccaaggggtcactattggtgaaactgaaactggaagagcaggtggaggagaactcgctgacacaattcctaagggataacgcgtcggtggaaattgacttgcatttgcccccagcccaggtactggtcaagactctgcagggccttccattggctcagttgccccgtaacattcgatcgcgcctttggctggtgatctttgttctatacagggatctcagtcttagccatcaggaggagaacgccaatcagattctggagctactaatagatcttatgcatttcggccatccgcttcccatatgcagctacttcccgcggctaagcgaactgctttgccttatccccaccagctcgacggtgggttggagcttctacgaaacactttttgcacgttgcattcgccgacagggtgccggtagtgaagcatttcttgcaagttgcacgggcttttttaaggatcaactggctgcgttaaacaaattgccagcggaagagcgtcgtcttttgctgctggccatcgaaacacttagcagtgtaactggagctcagggcaggcgattgcaaggccagctacagccacttattcagatctatggcgaaatggtgactcacaagtttcgctccaagaaaaaggaggcgtctgcttataaggagttcgtggatagcacgctatcaggttatgcaacttacgtgagcaattgcataaatagcgtagtcaggtgggagcgggaagagcagaagaagagaaatgagtcggagagttcagaaaaaacgaaggctgagccaaaagtagaccacaagaagaaaaatagggatccagagacagcgaagattcaggagttggaggacaatggaaagcagaggcagccgaaactcatagatgaaaactttcgacgtatctgtaagatatacattggtcactcgttgaactatcgcgatgctaatgcgacacgcttgctgaatgtggcgctcacccatcgtcaacgtttgcatttggatccggatgagatagagttcgtgctaagcagctattggaggcaattgaatacagacattgaggtgggcgacacattttccagttcagcactggattgtctggagccggccattaagctgatcattggctataagactaacgaggatttcctactgctcctgcaccgtctttcctcacaagtggagcaaatggcacgccctgcgtcgcaaacggagcacacggcgctccagaatgtgctaacccttttggctctctttgccaaatgctcgttgagcagcgtgaagggagcggatctaatccaggccatcattagctatcgcgcggaaagaaagctgacacaggacataagtgaaacggaggtggatggtttggcggacttgggtctgaaactggccactgtaatggccacagtgcgcgccacgcaggcactggccgtgaaaagtcgcacccttcctgcttatcttcaccattcgccaaatggtagcaaccgaaaggcccacgacgctgttcgaaaaggtgtgttttacgttaaggaaacgccattggccaactcaaggtcataa

SEQ ID NO: 91 - protein, 1227 aa, Drosophila melanogaster
MDTGEALKSWLTETNKPFAARVEFALKVWQSVEFPYLNKYEVIADWLAKSLGGCKDLPFQQLKDFLRLRAQPGWVTQTTKCQLIHALYEIVSREENANESALEVLPMVLSSELLQDALRSSNKLLFECYGSLFRCHQKCVELRKDNKDRTESQDHWDAEFVVPVIKQLTEMVRRSQEPEKLLEEYNSKTVRPLVELHLTLKTSCLDELAELEKQIKAEFDITRIKDLPLHVSLILLEASVLNNRFQTANISTILLCIFNTEALSQSSLQLTAHFLMSLRKYNVSLQFKLENLSITAFAYVSDQLLRLVREYKKSNLKEVLILLCSALRYNPLLLEQSVYQITVWMLTTPKENAQVEELYSEYLILLLDMFRRLSRAERFIINLLKVLGAWLGKYTLDVPPNEAKKRRIQDSKIIEAEGHQLEERFLGIIFNRTPLATAPSANDAFKQLCQTWPSHSAGVAFTRLISNLMSKPSLVIWKSLLHSFAELLEEDQPKEVLPENLDFARELHAALLCQYLNGTRLAEQVQLYQLQVEQQLQHTCQVLEQFGRLLLRQEHNRRLMNAFLECTERASGFELLLAYYWPDGFPASQRPVQLRGFLPTAEWTLIQQRVYNFGKNCCRLRLQRLELQLVESGWLLKDQRGANCSDALAELVPPYQLFRLSRPQKQLRLHQRKHNQSLEPHLNDSESIEILTLQLLKEYGAEAKEAKAKGSLLVKLKLEEQVEENSLTQFLRDNASVEIDLHLPPAQVLVKTLQGLPLAQLPRNIRSRLWLVIFVLYRDLSLSHQEENANQILELLIDLMHFGHPLPICSYFPRLSELLCLIPTSSTVGWSFYETLFARCIRRQGAGSEAFLASCTGFFKDQLAALNKLPAEERRLLLLAIETLSSVTGAQGRRLQGQLQPLIQIYGEMVTHKFRSKKKEASAYKEFVDSTLSGYATYVSNCINSVVRWEREEQKKRNESESSEKTKAEPKVDHKKKNRDPETAKIQELEDNGKQRQPKLIDENFRRICKIYIGHSLNYRDANATRLLNVALTHRQRLHLDPDEIEFVLSSYWRQLNTDIEVGDTFSSSALDCLEPAIKLIIGYKTNEDFLLLLHRLSSQVEQMARPASQTEHTALQNVLTLLALFAKCSLSSVKGADLIQAIISYRAERKLTQDISETEVDGLADLGLKLATVMATVRATQALAVKSRTLPAYLHHSPNGSNRKAHDAVRKGVFYVKETPLANSRS

SEQ ID NO: 92 - DNA, 3366 bp, Drosophila melanogaster
  CDS (1)..(3366): CT40992
atggttctcagttctgagctgctccaggatgccttgcggtccagcaacaagcttctattcgaatgctatggcagcctgttcagatgccatcaaaagtgcgtcgaacttcgcaaggataacaaggatcggactgagagccaagaccactgggatgcagagtttgtagttcctgtgatcaagcagctgacagagatggttcgccgctctcaggagcctgaaaagcttttagaagagtacaattcgaaaactgttcgtcctcttgtggagctgcatctgaccttaaaaacttcatgcctagacgaactggccgagctggaaaagcaaatcaaggcggagtttgacatcacacggattaaggaccttccgctgcatgtcagcctgatccttttggaggctagtgtcctgaataatcgcttccaaacagctaacatcagcaccatcttactgtgtatatttaacacggaggcattatcgcagtcatcgcttcaactgaccgcccatttccttatgtcactgcgtaaatacaatgtatccctgcagtttaaattggaaaatctatcgatcaccgcgtttgcctatgtttctgatcagctgctgcgtttggtgcgcgagtacaagaagtccaacttaaaagaggttttaatacttctctgttctgcgttgcggtataatcctctcctgctggagcagagtgtttaccagataaccgtttggatgctcacgactcccaaggagaatgcccaagtggaggagctgtattcggagtaccttattctactgctggacatgtttcgccgtcttagtcgcgcagagcggttcatcatcaatctcctcaaggtcctaggagcatggttgggaaagtacactttggatgttccccctaatgaagctaagaagcgacgcatccaggactctaaaattattgaagctgaaggccatcagttggaggagcgctttctaggcataatttttaatagaacccctttagccacagctccttcggccaatgacgctttcaagcagctgtgccaaacgtggccaagccactcagccggtgtggctttcactcgtttaattagcaacctgatgagcaaaccatctctggtgatttggaaaagtctgttgcattccttcgcggagctgcttgaggaggatcagccgaaagaagtgctgcccgaaaacctggactttgctcgggaactgcatgctgcgctcctttgccaatacttaaacggcactcgactggctgagcaagtgcaactttatcagctgcaagtggagcaacaactacagcacacttgccaggtcctggagcagttcggacggcttttactacgccaagagcacaaccgccggcttatgaatgcctttctggagtgcactgagagagccagcggttttgagcttctattggcgtactactggccagatggtttccccgccagccagcggccagtccagctgaggggtttcctgcccaccgccgagtggacgttgatccagcaaagggtgtacaactttggcaagaactgctgccggctgagattgcagcgtttggagctgcagcttgttgagagtggttggttgctgaaggatcaaaggggagccaattgttcggatgccctggctgagttagtcccaccgtatcaactctttcggctttccagaccacagaagcagctccgtttgcatcaaaggaaacataatcaaagcttggaaccccatctaaatgattcggagagcattgagatccttacattgcagctgcttaaggaatatggagcagaggccaaagaagcgaaggccaaggggtcactattggtgaaactgaaactggaagagcaggtggaggagaactcgctgacacaattcctaagggataacgcgtcggtggaaattgacttgcatttgcccccagcccaggtactggtcaagactctgcagggccttccattggctcagttgccccgtaacattcgatcgcgcctttggctggtgatctttgttctatacagggatctcagtcttagccatcaggaggagaacgccaatcagattctggagctactaatagatcttatgcatttcggccatccgcttcccatatgcagctacttcccgcggctaagcgaactgctttgccttatccccaccagctcgacggtgggttggagcttctacgaaacactttttgcacgttgcattcgccgacagggtgccggtagtgaagcatttcttgcaagttgcacgggcttttttaaggatcaactggctgcgttaaacaaattgccagcggaagagcgtcgtcttttgctgctggccatcgaaacacttagcagtgtaactggagctcagggcaggcgattgcaaggccagctacagccacttattcagatctatggcgaaatggtgactcacaagtttcgctccaagaaaaaggaggcgtctgcttataaggagttcgtggatagcacgctatcaggttatgcaacttacgtgagcaattgcataaatagcgtagtcaggtgggagcgggaagagcagaagaagagaaatgagtcggagagttcagaaaaaacgaaggctgagccaaaagtagaccacaagaagaaaaatagggatccagagacagcgaagattcaggagttggaggacaatggaaagcagaggcagccgaaactcatagatgaaaactttcgacgtatctgtaagatatacattggtcactcgttgaactatcgcgatgctaatgcgacacgcttgctgaatgtggcgctcacccatcgtcaacgtttgcatttggatccggatgagatagagttcgtgctaagcagctattggaggcaattgaatacagacattgaggtgggcgacacattttccagttcagcactggattgtctggagccggccattaagctgatcattggctataagactaacgaggatttcctactgctcctgcaccgtctttcctcacaagtggagcaaatggcacgccctgcgtcgcaaacggagcacacggcgctccagaatgtgctaacccttttggctctctttgccaaatgctcgttgagcagcgtgaagggagcggatctaatccaggccatcattagctatcgcgcggaaagaaagctgacacaggacataagtgaaacggaggtggatggtttggcggacttgggtctgaaactggccactgtaatggccacagtgcgcgccacgcaggcactggccgtgaaaagtcgcacccttcctgcttatcttcaccattcgccaaatggtagcaaccgaaaggcccacgacgctgttcgaaaaggtgtgttttacgttaaggaaacgccattggccaactcaaggtcataa

SEQ ID NO: 93 - protein, 1121 aa, Drosophila melanogaster
MVLSSELLQDALRSSNKLLFECYGSLFRCHQKCVELRKDNKDRTESQDHWDAEFVVPVIKQLTEMVRRSQEPEKLLEEYNSKTVRPLVELHLTLKTSCLDELAELEKQIKAEFDITRIKDLPLHVSLILLEASVLNNRFQTANISTILLCIFNTEALSQSSLQLTAHFLMSLRKYNVSLQFKLENLSITAFAYVSDQLLRLVREYKKSNLKEVLILLCSALRYNPLLLEQSVYQITVWMLTTPKENAQVEELYSEYLILLLDMFRRLSRAERFIINLLKVLGAWLGKYTLDVPPNEAKKRRIQDSKIIEAEGHQLEERFLGIIFNRTPLATAPSANDAFKQLCQTWPSHSAGVAFTRLISNLMSKPSLVIWKSLLHSFAELLEEDQPKEVLPENLDFARELHAALLCQYLNGTRLAEQVQLYQLQVEQQLQHTCQVLEQFGRLLLRQEHNRRLMNAFLECTERASGFELLLAYYWPDGFPASQRPVQLRGFLPTAEWTLIQQRVYNFGKNCCRLRLQRLELQLVESGWLLKDQRGANCSDALAELVPPYQLFRLSRPQKQLRLHQRKHNQSLEPHLNDSESIEILTLQLLKEYGAEAKEAKAKGSLLVKLKLEEQVEENSLTQFLRDNASVEIDLHLPPAQVLVKTLQGLPLAQLPRNIRSRLWLVIFVLYRDLSLSHQEENANQILELLIDLMHFGHPLPICSYFPRLSELLCLIPTSSTVGWSFYETLFARCIRRQGAGSEAFLASCTGFFKDQLAALNKLPAEERRLLLLAIETLSSVTGAQGRRLQGQLQPLIQIYGEMVTHKFRSKKKEASAYKEFVDSTLSGYATYVSNCINSVVRWEREEQKKRNESESSEKTKAEPKVDHKKKNRDPETAKIQELEDNGKQRQPKLIDENFRRICKIYIGHSLNYRDANATRLLNVALTHRQRLHLDPDEIEFVLSSYWRQLNTDIEVGDTFSSSALDCLEPAIKLIIGYKTNEDFLLLLHRLSSQVEQMARPASQTEHTALQNVLTLLALFAKCSLSSVKGADLIQAIISYRAERKLTQDISETEVDGLADLGLKLATVMATVRATQALAVKSRTLPAYLHHSPNGSNRKAHDAVRKGVFYVKETPLANSRS

SEQ ID NO: 94 - DNA, 483 bp, Drosophila melanogaster
  CDS (1)..(483): CT32721
atgccattcggtaactatgagctttatatagccacatctgatccactaaagcagcgtgatgtcattccaaaaaagcgtccgtccaaagcattcaatcgcaagccgccgaccaaactggaatccgaggaggaggagtaccacaaattcgagcgtggtctccacatttctgacttaggccccaagttaaaggagacggatggacagccaaagcttaagttcgagctggcagacgactacaagagctccaaacactgcatctgcatgcgctcaaacaccgcatacgagtgcgaacgatgccatcagtacttctatggtcgcctcgcccagatttgtgatctgcatccaaatgagtttttccttatggactttcgcaattgtccattctgtaaggcacccattgagatgattaagaagtcacctatcagctgggagacaatacgtaagattgaagaagccgaattgcccagtgatggggatctataa

SEQ ID NO: 95 - protein, 160 aa, Drosophila melanogaster
MPFGNYELYIATSDPLKQRDVIPKKRPSKAFNRKPPTKLESEEEEYHKFERGLHISDLGPKLKETDGQPKLKFELADDYKSSKHCICMRSNTAYECERCHQYFYGRLAQICDLHPNEFFLMDFRNCPFCKAPIEMIKKSPISWETIRKIEEAELPSDGDL

SEQ ID NO: 96 - DNA, 5193 bp, Drosophila melanogaster
  CDS (1)..(5193): CT33014
atgcaaatctcgccggacaatctacatgataatatgctgcccaagtggggaaaacttaatggcacatacatgggctataaaaggaagataaatcgcgacgatggactgccgcaagaaatctgccggcagtgcatggcccagtttttgatggtggccaagttccggcggaaatgtgtacggatgcagcagcgcctgcaggactttgcccaggagatatccgaccgccagacggccagacaagcgaagcgtcagcaaaaagtccaaaagaagacacacgataggtggctgcagttggagccaaccagccacgaggagcagcagcccatacgtaagcgccgcatggtatccgaatcggacggagattcgacagcagcagcagcagcagcagaagcagcaacagcaacagcaacaacaccagccaaacaggtgcgaacggatttcgagagtttgccaccgcccaaaccaagtcctcaacagcaccgagtgcgcaagtatcgaaccctctccattgactgtgaaatggagcgtcccgccgcttccatcaatgccagcagcatgccctggaagacgaaggctgcccgcaaagaactttcggagaattgggcgtccagttgctcgacggcggttatgtcgcccaatcgccaacgcagcagcaccagcagcagtgagcacatgagcgacttgtccgtcggtccatgctgtggcttcgaaagcgacagcaatccgtcctctacctccaactcggcgcggagaacggtgatactcgttaagcagcaatcgccggagaagacatcgcccatgtatgatttaatgccgcgcagaggacggcggcccaggaaagcaccgatatacatgccggccaaaagacagaggcgatcgctggttagaaaggagccgctataccgaaaagcacagccagtcaacgaagagaacaaaaagtctgatcaaaaggatatatatccgaaggaatcaaggatggaaggccttgcaccgtcctgtgatgaggccatcgacagcacttccgatgcgccaatggaagtagcctctaatgtggtccaaaagaagtgcgatgaaatctgtttaaatggtttgatagacagtcgcaaccagttaggcgccatggaaatggagccggttaatgaaatgatagcgtccaatggtgtagataaagaactaaccctcagcgttcaaaataataaggaaacaacatccgaagagcaaatatttgaagccaccagcgttataaaagaatcagttcaaccagaacaatctgctgaagatattcaggttagaacggaaatcgagtcaattgcgaatgacatcagggctgaggctgatctagtgcagtccgaggaactgacctcatccacagagaccagcgagtcgcaaccgaaagcagttgagcagctggaatctatgggaaagcaggaatcgtatgcgttaccacaaaacatggaggcgcatgaatccgtccaacaaacgcaaactgtggacgaatcagactctgctgaccagagggagatcatagtgagcataccgctggaggttctggatgagaatctgcagcgtcgcctttgcgtggatccggaaactgaggcggccaatcgtcagtccgctgatcccaaggagtttgccctgcgtcccgatgacgtgaacaacaacgaaaacgatgaaaatttttgccagagtgctacagcagatagcttcaattctgctgtggcactccgaaccaataaaattgaagcaacaccgcctgggggaacggattcagatgacacggacacggatgaggtgccgatagtgccatctgggccaacgcccatggatttcatggccgagtttgccaagcactgtgcgaacggaattgaacagctcaaggttactacaccggtgccatcaccgactccctcggatttggtacccctcaacgatctggaggccaagcagaaactggaggtggagatgaacgacgtggagaccacactcaatggcatcctcaatgagatgcaggaccagcacatgtacacaccaaactgtgcccacattgatgagttcctcactccagccgattatgccacactgactgagcaggagtcgtccgtttcgtcgccaccaaatcctttcgagcagagttctgttgccgaaccgaaggacgaaaagcccagtgccactgaggatccatttgataatagcaactttaccaatgaactgattggttttcaaaacgatattccctgtttcgagaacattgagacaccagaggagggacaaaatttgcatttagaactgacccagttcttaagggatctgcagccgtcacaatccgatccgccggcaggggagcaggtggaaaaaatcgaaatggagacacagccaagcaccgtccaaatggatgtccaatcaaacctaccagtccaagctgctgatacacagcctcaaaatgagtccgctaatcattcaccatttgaatctcccatatcatcacctcaagttcagtctcagatcgaattacaaatggaacctcaaatcgagactcaaatgcaacctcaaattgagactcgaatgcaacacgatgtgctaagcgtgcaatcgccacaaaaccatcagcctcaagtacaatctcatgaccaatctcagatgcaacaccaaatcccaccgcaaattgagcctcaaattgaagtccaaaaccaggagcaaaatactttacagctcgtgccgcaagcacagcatcaagtggttccacatgtacaactgcagtcccagttggtgcctcacgtccagacgcagggcacgacgacgacagtcacctacgaacagatttaccagcagcacattgtccagcagacggtgcagcaatcctccaacaagatgcaggtcatctcgctgccctcggctggctcggaaacaacacgacagtggcagacgcagcagtcgcagcaacagcagcaagtccagtggtcatcggttggcggacttgaggccataaagagtgcacccgtcgagagtgttgcacccacgaccacaacgtactacatcagtgcgagcgatctttatccgcagcagactgaaacatacacgatgcttcaaccagcatccaatgaaagctacgtcattgagcaggtgaatcatcagcagcaacattgccagcaacagattcagatgtcgcaacagcaacatcaacgccagcatcagcaacagcaggcgcaacagcagcagcaaccgattatgatactgatccagcagccagagattcagcagccagtggcctcggccagcaatccgcagcaggcaccgctgcacatctataatgctgccaccagcaacgatgtgcatcaaatgcagcacacgcaacgccaacagatacggcagcagtatcaacaccagcagtatcagcggctgcaacagccgcaacaaactcgcgtcgtacaaagccatccagtattgggaatgccgggagccacttccatatcaacgaaagtgacccccattcccgtcacagcggccaggggtcggccgctcacgctgaagtgccgcttctgccataacgggccgcgattctccagcagcctggagtacagccggcatatcatcgatctgcatccggcggtggcgcccttcaattgtccacactgtccgatggcctttgccggccgaacgaagcgatcgcagcacatcctcagccatcatgtggtgcagcagtaccagtgcggtcagtgctcacatgtgtttcccgcccagaaggcactggacgttcacatccagcgctttcatatgaccctgaaaacggatccatcgggcgctgtgaaggtggaggacgttcagctgcagatcaccagcgaacgcaggccgcggggtaggccgtataagccaaggctacagcttcaacagcatcaactgcagccgcagcagaagttacaagtgcagcagcatcagcagcagcagaaggcacttcagcaactaccccaagcacaacaccaccaacagcaacagcaacctcaacttcaacaagaagtgctacagcaggtgcagcaactgcaagtgcaagtgcaaccgcagcaacaccagcaacaccaacaagtgttgcaagtgcagcaaccacagcaacaaccgttaatgcagccacagtcgccgcatccatcaacagtggaaatgcaagcaagcccaacaacgccacgaaagattctttgctgtcccgattgcgaagactgcacttccggccacagccatgccaacgaacagttcgaggagctgcagacactgcaggcgccgccaacggtgttgactccgccatcgaccatagtctcggtaccatcgccacagcccatggtgtactcgcagcacataacaatgccgtcgccggaacaatccgaaccagattccacaaccacgttgcgacagtatcgcaagcgaggcgtgatcgttgggccacagggtccgctgcatttggccacaccggtggcctcgccatcgccctcgtcgtcaccctcctcatcgacggtggatcacataccgccggcatctccggctacgcccgcatcaccagctccgcctccgtcgcccgccgtcgcgtccacggtgcaagtgagcgagctgcgaacgagtcaccattgtctgtactgcgaggagcgattcaccaacgaaatttccctgaagaagcaccatcagctggcgcacggagcgctgacaacaatgccatatgtgtgcacaatctgcaagcgagggtatcgcatgcgtacggcgctgcatcggcacatggagtcgcacgatgtggagggacggccgtacgagtgcaacatttgtcgcgtccggttcccgcgaccatcgcaactgacgctgcacaagatcacggtgcacctgctctccaagccgcacacctgcgacgagtgtggcaaacagtttggcacggagagcgccctcaagacgcacattaagttccacggagctcacatgaaaacccatttgccgctgggcgtattccgcaacgaggatgccgcatcgaagtcacccagcaacaacaatagccacgccagcagtgacaagctggagaatccagctacgcccatcgaggagacacctttgacgccgatgagcagtggcggccacttgtaccacagcccagatgaataccccaattcggtggagagctgcgctggcaacagtgtggctctggaatcctatgccacaacgccataa

SEQ ID NO: 97 - protein, 1730 aa, Drosophila melanogaster
MQISPDNLHDNMLPKWGKLNGTYMGYKRKINRDDGLPQEICRQCMAQFLMVAKFRRKCVRMQQRLQDFAQEISDRQTARQAKRQQKVQKKTHDRWLQLEPTSHEEQQPIRKRRMVSESDGDSTAAAAAAEAATATATTPAKQVRTDFESLPPPKPSPQQHRVRKYRTLSIDCEMERPAASINASSMPWKTKAARKELSENWASSCSTAVMSPNRQRSSTSSSEHMSDLSVGPCCGFESDSNPSSTSNSARRTVILVKQQSPEKTSPMYDLMPRRGRRPRKAPIYMPAKRQRRSLVRKEPLYRKAQPVNEENKKSDQKDIYPKESRMEGLAPSCDEAIDSTSDAPMEVASNVVQKKCDEICLNGLIDSRNQLGAMEMEPVNEMIASNGVDKELTLSVQNNKETTSEEQIFEATSVIKESVQPEQSAEDIQVRTEIESIANDIRAEADLVQSEELTSSTETSESQPKAVEQLESMGKQESYALPQNMEAHESVQQTQTVDESDSADQREIIVSIPLEVLDENLQRRLCVDPETEAANRQSADPKEFALRPDDVNNNENDENFCQSATADSFNSAVALRTNKIEATPPGGTDSDDTDTDEVPIVPSGPTPMDFMAEFAKHCANGIEQLKVTTPVPSPTPSDLVPLNDLEAKQKLEVEMNDVETTLNGILNEMQDQHMYTPNCAHIDEFLTPADYATLTEQESSVSSPPNPFEQSSVAEPKDEKPSATEDPFDNSNFTNELIGFQNDIPCFENIETPEEGQNLHLELTQFLRDLQPSQSDPPAGEQVEKIEMETQPSTVQMDVQSNLPVQAADTQPQNESANHSPFESPISSPQVQSQIELQMEPQIETQMQPQIETRMQHDVLSVQSPQNHQPQVQSHDQSQMQHQIPPQIEPQIEVQNQEQNTLQLVPQAQHQVVPHVQLQSQLVPHVQTQGTTTTVTYEQIYQQHIVQQTVQQSSNKMQVISLPSAGSETTRQWQTQQSQQQQQVQWSSVGGLEAIKSAPVESVAPTTTTYYISASDLYPQQTETYTMLQPASNESYVIEQVNHQQQHCQQQIQMSQQQHQRQHQQQQAQQQQQPIMILIQQPEIQQPVASASNPQQAPLHIYNAATSNDVHQMQHTQRQQIRQQYQHQQYQRLQQPQQTRVVQSHPVLGMPGATSISTKVTPIPVTAARGRPLTLKCRFCHNGPRFSSSLEYSRHIIDLHPAVAPFNCPHCPMAFAGRTKRSQHILSHHVVQQYQCGQCSHVFPAQKALDVHIQRFHMTLKTDPSGAVKVEDVQLQITSERRPRGRPYKPRLQLQQHQLQPQQKLQVQQHQQQQKALQQLPQAQHHQQQQQPQLQQEVLQQVQQLQVQVQPQQHQQHQQVLQVQQPQQQPLMQPQSPHPSTVEMQASPTTPRKILCCPDCEDCTSGHSHANEQFEELQTLQAPPTVLTPPSTIVSVPSPQPMVYSQHITMPSPEQSEPDSTTTLRQYRKRGVIVGPQGPLHLATPVASPSPSSSPSSSTVDHIPPASPATPASPAPPPSPAVASTVQVSELRTSHHCLYCEERFTNEISLKKHHQLAHGALTTMPYVCTICKRGYRMRTALHRHMESHDVEGRPYECNICRVRFPRPSQLTLHKITVHLLSKPHTCDECGKQFGTESALKTHIKFHGAHMKTHLPLGVFRNEDAASKSPSNNNSHASSDKLENPATPIEETPLTPMSSGGHLYHSPDEYPNSVESCAGNSVALESYATTP

SEQ ID NO: 98 - DNA, 1944 bp, Drosophila melanogaster
  CDS (1)..(1944): CT33019
atgtccatgcaaaaggccaaagtcatcgaccagaaggagtacctcaagaagtacctatccggcgacaaggagaagaagaagaaaaagaaggagaagaagcacaaaaagaattcggccaacaccaaagtgaaaatcatcgatgacgacgcctacgaaaatgataatctggaaatggacgaagatctactgctgggcggcgaggatgcgcctcaaattgtgggcgagtacatcgaagaggatcccaatgtgcgcagcaagtggcgcaacattgccgtcaaggatgaaatcaaagaagagcacgaggaatcctcgccagcaactggcattcgcatcaaacaggagcccttggatgaggagcaggagatgtggggacgcaaggcgacagttgttaaggttaaggatgaattctcaccatccagacgaagttcacccgtcagaattaagcaagaaaaacgcagcagctctagggatttaagcccagcgagatcgagtaagccagcaaagcgagaagagagtcctcaaagggggcgaagaagggcgggaagctcagatcagagtcccaccagacgagggcgagatggcgatcagtctccgccacgccaaaagcacagggattccgatcagagtccaccccgaaaggccaggaatggcaatcaatcgccagtcagaaaaaggcgggattccgaccaaagtccgccaagaaaacgaacgggaaaagcatcacccactcgaaggagaagggattccgatcaatcgccacccagacgccgcagaagtaactccgatcagagtccgccaaggcgacgtagagacaaggattcaactccgcccagaaggaggaaagattccgatcaaagcccacctcgaaggcgtaaagcagacgatcaatctccggtgcgaagggaaaggaaagactccgaccaaagtccgcctaggaaacggagagacaatgaccagtctccagtgcgaaggaggcgggattcagatcaaagcccgccccgaagacgcagagatgacaagcaaacgccgccaaggaggagaagaaactccgatcaaagcccgccaagaagacccaaggatgtagatcaatcgccaccgcgaagaaaacgagacttcgaccaaagtccaaccagaaaacgagacaaatcaccacgcagacgtcacgactccgaccaaagcccggccagaaatcacagaagtcgagagcgcagtccaccgcctcgtaatcgcttcaaggaagaaaggaaaagtcgctgggccaaggcatcgcccagcaaatcagcatctccacctccgacacacaagccgaaatccaccaagacactagatggcaagaaagctggactgcaggatgcgaaatcgctgaagaaggaaaccgacgaaaggcgtcgacaagaacatgaactattcgagaaaatgtccagcgaaatttccggtcgtgatggcgatgtgcaggtgcgcagtactcgcagaaagggacaccgagcacgagatgccgccaatgaggatcccgccgagcagggccgcaaagaggagcacgagaaaaagaagaaggaactgtacgatcgctggggcaaggggttgaagcaaatagaagatcacaagtcccgcctggaggagatggtccatgaggcctccaaaccggtggctcgctatgccaacgacgaggatctggacaggcatctgcgcgaacaggagcacgccgacgacccgatgctggagtacatgcgccagaagcgcaagaaacgcgaccagcaggacaacaagccggtgatgcccaagtacgagggcagctttccggagaaccgatttggcatccgaccaggatatcgctgggatggcgtcgatcgatccaacggctacgagcagcgttggttcgacaaacagaacgaacggcgggccgtgcaggatgaggcctacaagtacagcgtggaggatatgtaa

SEQ ID NO: 99 - protein, 647 aa, Drosophila melanogaster
MSMQKAKVIDQKEYLKKYLSGDKEKKKKKKEKKHKKNSANTKVKIIDDDAYENDNLEMDEDLLLGGEDAPQIVGEYIEEDPNVRSKWRNIAVKDEIKEEHEESSPATGIRIKQEPLDEEQEMWGRKATVVKVKDEFSPSRRSSPVRIKQEKRSSSRDLSPARSSKPAKREESPQRGRRRAGSSDQSPTRRGRDGDQSPPRQKHRDSDQSPPRKARNGNQSPVRKRRDSDQSPPRKRTGKASPTRRRRDSDQSPPRRRRSNSDQSPPRRRRDKDSTPPRRRKDSDQSPPRRRKADDQSPVRRERKDSDQSPPRKRRDNDQSPVRRRRDSDQSPPRRRRDDKQTPPRRRRNSDQSPPRRPKDVDQSPPRRKRDFDQSPTRKRDKSPRRRHDSDQSPARNHRSRERSPPPRNRFKEERKSRWAKASPSKSASPPPTHKPKSTKTLDGKKAGLQDAKSLKKETDERRRQEHELFEKMSSEISGRDGDVQVRSTRRKGHRARDAANEDPAEQGRKEEHEKKKKELYDRWGKGLKQIEDHKSRLEEMVHEASKPVARYANDEDLDRHLREQEHADDPMLEYMRQKRKKRDQQDNKPVMPKYEGSFPENRFGIRPGYRWDGVDRSNGYEQRWFDKQNERRAVQDEAYKYSVEDM

SEQ ID NO: 100 - DNA, 912 bp, Drosophila melanogaster
  CDS (1)..(912): CT33241
atgcagttagctcgacgttgccagatcgtttcatacatccgacagttggcattccgcagacagctgcacctggccacactggcccaagctgttagaccaaaacattcccagttcagtttccaattggacgccaggatcaaaggagcgcagccgcgggcacaggagcacgcgaagcacacggagccaaggactcgaggacccgaggagcacaagaagccaagaagagcccagctgctggccagaatgaacggactgccgccgagcaagcactacaacctgacgcactaccagcagcgctacaactgggactgcggtctgtcctgcatcattatgatcctgtcggcgcagcaaagggaacagcttcttgggaactttgatgccgtgtgcggcgaggagggatttggctcgagcacctggaccatcgacctgtgctatctgctgatgcgctaccaggtgcgccacgagtacttcacccaaacgctcgggatcgatcccaactacgcgcagcacacgtactactccaagatcatcgacaaggacgaacggcgcgtgacgcgcaagttcaaggacgcccgggcccatggactgcgcgttgaacagcgcaccgtggacatggaggtcattctgcggcatttggcccgccacggacccgtcatcctgctgaccaacgcctcgctgctcacgtgcgaggtgtgcaagcgcaatgtcctagagaagttcgggtatgccggacactatgtggtgctctgcggatatgacatggccgcccagaagctcttctaccacaatcccgaggtccacgatggccacatttgtcgctgcctcatcgagtccatggacacggcccgacgcgcctacggcacggacgaggacatcattttcatatacgagaagaaggaaactagggagtaa

SEQ ID NO: 101 - protein, 303 aa, Drosophila melanogaster
MQLARRCQIVSYIRQLAFRRQLHLATLAQAVRPKHSQFSFQLDARIKGAQPRAQEHAKHTEPRTRGPEEHKKPRRAQLLARMNGLPPSKHYNLTHYQQRYNWDCGLSCIIMILSAQQREQLLGNFDAVCGEEGFGSSTWTIDLCYLLMRYQVRHEYFTQTLGIDPNYAQHTYYSKIIDKDERRVTRKFKDARAHGLRVEQRTVDMEVILRHLARHGPVILLTNASLLTCEVCKRNVLEKFGYAGHYVVLCGYDMAAQKLFYHNPEVHDGHICRCLIESMDTARRAYGTDEDIIFIYEKKETRE

SEQ ID NO: 102 - DNA, 276 bp, Drosophila melanogaster
  CDS (1)..(276): CT33317
atgcatcgcattgaaatctcgttcgtccgtcgcctctgtgtttcagccggacgagctccaccggaaccctactacggtcgctatattggagattttaccaactttgcccatggcattaagggtcaaatctacgcggtggacgagtcgacgctgttcgtcaaatcctttgcctacgacggcaccggaccggacgccttcttctgggtgggcaagacgccaaggcccagtcccgatggctacatcattccctatccggaggagtacacgggcatgtaa

SEQ ID NO: 103 - protein, 91 aa, Drosophila melanogaster
MHRIEISFVRRLCVSAGRAPPEPYYGRYIGDFTNFAHGIKGQIYAVDESTLFVKSFAYDGTGPDAFFWVGKTPRPSPDGYIIPYPEEYTGM

SEQ ID NO: 104 - DNA, 1605 bp, Drosophila melanogaster
  CDS (1)..(1605): CT3228
atggactcgagcaagtttgccaccttcttcggcaacgtgcccacgttcaccattccgggacgcacctttcccgtggacgtgatgttcagcaagaacacctgcgaggattacgtggaatcggcggtgaagcaagcgttgcaggttcacctcacgcccaacgagggcgacatgctcatcttcatgcccggccaggaggacatcgaggtgacgtgcgaggtgctcgaggagcgactggcggagatcgataatgcgccggcactaagcatactgcccatctattcgcaattgccgtccgatttgcaagcaaagatctttcagaaatccagcgatggattgcgcaagtgtgtggtggccacgaacatagcggaaacatcgctaaccgtcgacggcatcatctacgttatcgattccggctactgcaaactgaaggtctacaatccgcgcatcggcatggacgccctgcagatctatcccatatcgcaggcgaatgccaatcagcgcagcggtcgtgccggacgcacaggacccggtcaggcgtaccgcttgtatacgcagcgccagtacaaggacgagctgttggccctaaccgtgcccgagattcagcggaccaatctggccaatacggtgctgttgctcaagtcactgggcgtcgtcgatctgctgcaattccactttatggatccaccgccgcaggataacattcttaactcgctgtaccagttgtggatcctgggagcactggaccacactggtgcgctgaccacactgggtcgccagatggccgaattcccgttggatccgccccagtgccagatgctaatcgtggcctgccgcatgggctgcagtgccgaggtgctgatcatagtttccatgttgtccgtgccatcgatcttctaccggccaaagggccgcgaggatgaggcggatggtgtgcgcgaaaagttccaaaggcccgagtccgatcacctgacctacctcaacgtttatcagcagtggcgccagaacaattacagttcgacctggtgcaacgaacattttatccacatcaaggcgatgcggaaggtgcgcgaggtgcggcagcagcttaaggacatcatgacgcaacagaatctgagcgttataagctgcggcatcgactgggacattgtgaggaagtgcatctgctcggcatacttctaccaggcggccaggctcaagggtatcggagagtatgtcaatctgcgaactggcatgccatgccacctgcatcccacgtccgcgctgtatggcttgggcaccacgcccgactatgtcgtctatcacgagctgatcatgaccgccaaggagtatatgcagtgcgccaccgctgtcgatggctactggctggcggaattgggtcccatgttcttttcggttaaggagtccggtcgcagcgggcgcgagaagaagaaacaggcggccgagcatctcaaggagatggaggagcagatgctgaaggcgcagcacgagatggaggagcgcaagcagcaggccgccgaacgggaggaacagctggccaccaagcaggagatcgccacaccgggcaatgccacgccccgacgcacgccggccaggattggcctttaa

SEQ ID NO: 105 - protein, 534 aa, Drosophila melanogaster
MDSSKFATFFGNVPTFTIPGRTFPVDVMFSKNTCEDYVESAVKQALQVHLTPNEGDMLIFMPGQEDIEVTCEVLEERLAEIDNAPALSILPIYSQLPSDLQAKIFQKSSDGLRKCVVATNIAETSLTVDGIIYVIDSGYCKLKVYNPRIGMDALQIYPISQANANQRSGRAGRTGPGQAYRLYTQRQYKDELLALTVPEIQRTNLANTVLLLKSLGVVDLLQFHFMDPPPQDNILNSLYQLWILGALDHTGALTTLGRQMAEFPLDPPQCQMLIVACRMGCSAEVLIIVSMLSVPSIFYRPKGREDEADGVREKFQRPESDHLTYLNVYQQWRQNNYSSTWCNEHFIHIKAMRKVREVRQQLKDIMTQQNLSVISCGIDWDIVRKCICSAYFYQAARLKGIGEYVNLRTGMPCHLHPTSALYGLGTTPDYVVYHELIMTAKEYMQCATAVDGYWLAELGPMFFSVKESGRSGREKKKQAAEHLKEMEEQMLKAQHEMEERKQQAAEREEQLATKQEIATPGNATPRRTPARIGL

SEQ ID NO: 106 - DNA, 477 bp, Drosophila melanogaster
  CDS (1)..(477): CT33819
atgccaaaggcccatcgtgtcgcgatctacgagtacctcttcaaggagggcgtgatcgtggccaagaaggatttccatgcccagaagcacccggaactggagtcgatccccaacttgcacgtgatcaaggcgatgcagtcgctccactcgcgcggactggttaaggagcagttcgcctggcgccactactactggtacctcaccaacgagggaatcgaggagctgcgcagctacctccacctgccgcccgagatcgtgccctcgacgctgaagcgccctgcccgctcggagaccgtccgtccccgtcccgccgttggcggcccacgcggacccggtgacgcctccaagaccggagaggatcgctccgcctaccgacgtgctcccggcggcagcggagtggacaagaagggcgatgttggacccggtgccggagaggtcgagttccgtggcggattcggacgcggatcgcgcaactaa

SEQ ID NO: 107 - protein, 158 aa, Drosophila melanogaster
MPKAHRVAIYEYLFKEGVIVAKKDFHAQKHPELESIPNLHVIKAMQSLHSRGLVKEQFAWRHYYWYLTNEGIEELRSYLHLPPEIVPSTLKRPARSETVRPRPAVGGPRGPGDASKTGEDRSAYRRAPGGSGVDKKGDVGPGAGEVEFRGGFGRGSRN

SEQ ID NO: 108 - DNA, 2514 bp, Drosophila melanogaster
  CDS (1)..(2514): CT3352
atggagttcctgaagagtggcatcaaaacggtgctgggcagcacggagccgggtcagcagccgagtgccgccgagacggtggagaagctggtggaccgtgtctactcctcaacgctcctggaggatcgacgggatgcctgccgagcgctaaaagccctgtcccgcaagtaccgcatcgaggtgggcgcacagggcatgcctccgctggtccaggtgctccagaacgacggacaggatgcagagatcatcagctatgcgctggacacactgtgcaacgtggttactagcgaggagttcgacgaggaggctgataatcccaccgtttcggtgaatgtgggcgagcagttcacggagatgttcatcaagacaccggagcatgtaaccctggtaatgggctatctggacgaatacgattttcgagtgcgtcgcgctgccatccaactgattacgtccctcatttcgaacaagacgcgggagctgcaggatttgattctggtcagtccgatgggcgtttccaagctgatggatctgctgacggacagccgcgaagtgattcgcaacgatgtccttctgctgcttatcgaactgaccaagggcaactcaaacatccaaaagattgtggcctttgagaatgcctttgaccgcctttttgaaattgtccgtgaggagggctgttcggatggcggaattgttgtggaggattgcctaattctgctattgaatcttctcaagaacaactccagtaatcagcagttctttaaggagggcagctatatccagcgattgtcgccaatgtttgagctctcacaggatgcggaagaggttggctggtcgccacagaaggtctcaaacttccattgtctgctgcaggtggtgcgggcactggtcacgcccagtaatcaacagcaggtggtggccgcctgccagcgggtcatgcaaaagtctcgactgctccatgctctttgcgagattctgatgagcagtggtgtccctgcggatatactcacggaaaccatcaatgcagtggccgaagtggtgcgcggcgatcgggacaaccaggatgaattgggaagagttatggctccgagcagtccacccagacctgccatcgtggtccttcttatgtccatgatcaatgagaaacaactgctggcactgcgttgcgccgtactctactgtttcgagtgctttctttatcgcaatgccgatggccagcgggcggttgtacagaccctgctgccctccagtgcgtccgatgtgagtgccctttcgacgggacaactcctttgcaccggactcttctccacagatgcgcttgccaactggttctccgctgtggccctaatgcactcactcgtagaggatgtcgccctaaaggaggaactactgcgcgtactgctggccactcctggtggccaaaagcctatcacgctactcgagcagtgcactaatctcatgcagcaggaacgctaccgtttgcaaagcaaggtgggtctgctaatgctactcagcctgtggctgccgcattgtccaggtgcggtgaaggctttgctggaaacgcagggcaccatggcctacctgaccgctcaactttgctccaacgagcacgatgaacgagagttccttgtccagggcatgtgcgcattcctaatgggcctgtgcatccagttcaatgacaactcgctgccggggcagaagcgcgaggacatcagtcagctgatcatcaagcgaattggccaggagagcttctgtagcaaactagcagaagtgtcgcgacatgaggcctacagtcgggcatgcaagcaggcccagatccgtgccaaatccgctggggaactactgcttgacttcgagtattgcaagctgtacaagggactggaggcgttgattgccaagctggttagcggatttgatgtagatggcattgaactgaccgaactcacgttgagctcggaagcttctgcattggtttcccagtacaaggggattatccgcggcatggatgcccagatccaagcactgcagcaatcctccaaagaactggaacaggagaatgccgagctgaaggagaaacttggtgaggagcagtcgctcaaggcgcagctcttggaccagaacacgctgcttaaggcacagctgggagcctcgaccggtcaggtgcagtccgcccaaggtgcggaagccacgccgcccaacgaggaggagctaaatgccgctcggctaaccaggccaacatgtactttgccgaaaacattcgtcataactaaggagctggagacactacgtcagcagttatcagccgaaaaacagagtgcagatgcggcgcaagattccctggcggcgatgcaaaaggatcaagaagatttgctcgaactgctggccgatcaggaggcaaagctaacgcgatacgaagaagcgggctcgactaatacccttccgacttccaatgtagctccaagcgtgccggcagctggcggaggaagccccatcccaagtggcaccgccagcaggtag

SEQ ID NO: 109 - protein, 837 aa, Drosophila melanogaster
MEFLKSGIKTVLGSTEPGQQPSAAETVEKLVDRVYSSTLLEDRRDACRALKALSRKYRIEVGAQGMPPLVQVLQNDGQDAEIISYALDTLCNVVTSEEFDEEADNPTVSVNVGEQFTEMFIKTPEHVTLVMGYLDEYDFRVRRAAIQLITSLISNKTRELQDLILVSPMGVSKLMDLLTDSREVIRNDVLLLLIELTKGNSNIQKIVAFENAFDRLFEIVREEGCSDGGIVVEDCLILLLNLLKNNSSNQQFFKEGSYIQRLSPMFELSQDAEEVGWSPQKVSNFHCLLQVVRALVTPSNQQQVVAACQRVMQKSRLLHALCEILMSSGVPADILTETINAVAEVVRGDRDNQDELGRVMAPSSPPRPAIVVLLMSMINEKQLLALRCAVLYCFECFLYRNADGQRAVVQTLLPSSASDVSALSTGQLLCTGLFSTDALANWFSAVALMHSLVEDVALKEELLRVLLATPGGQKPITLLEQCTNLMQQERYRLQSKVGLLMLLSLWLPHCPGAVKALLETQGTMAYLTAQLCSNEHDEREFLVQGMCAFLMGLCIQFNDNSLPGQKREDISQLIIKRIGQESFCSKLAEVSRHEAYSRACKQAQIRAKSAGELLLDFEYCKLYKGLEALIAKLVSGFDVDGIELTELTLSSEASALVSQYKGIIRGMDAQIQALQQSSKELEQENAELKEKLGEEQSLKAQLLDQNTLLKAQLGASTGQVQSAQGAEATPPNEEELNAARLTRPTCTLPKTFVITKELETLRQQLSAEKQSADAAQDSLAAMQKDQEDLLELLADQEAKLTRYEEAGSTNTLPTSNVAPSVPAAGGGSPIPSGTASR

SEQ ID NO: 110 - DNA, 3849 bp, Drosophila melanogaster
  CDS (1)..(3849): CTCT33841
atggtggcccaggagcagctcgtcctgctgctcatgctgcttgccggctgccggggtggcgccaacgccatcttggatcctggctgggtgattccctccaaggtggagcagctcatcggcggcgactttaatctgagctgcaccctcaacgaagactactttaacggcaagagcgccgaggactgcccggtggagaagctgtactttacaggcggcggccgcgtctaccgcgattccaagcacatccgaatcctgaacaacaccaccatcctgtttagcgacacgaatgccgtggagcaagagaacgactaccactgcatgtgcgacgagtatgtgatcaacaagtcaaaggtctacgtgggcaccaggccgctcctggtgcgcgacttcaactgcctggactacgacttccagtttatggtgtgcaacttcacccagccgcccaacacggtcatcaccaagtacaacatcagctacaacaccaacaacgactggcgatatagcaacacactggactgcaacttcgactcggcgccagtggtcacctgtaacctaaccgacgacaactacaagcgcttcagcgagaccttctacttccgactgtccatctccaatgccctgggccacgagacgcagccgatcacgatcaatcactttgagcgtctggtgccggcgcgacctggccagaacctgaccctgctcaacaggaccgagagctccgtgtgcctgtcgtgggagatgccccgtcggtccaactacaatcgcggcctggtgtggcaggtgcgcgtcacgccgcaaaactttgagcccatcacgcggcccagctggcgaaaccacacgctgaccatcaaggacacgctctgcctcacggagctgcccttcgccggctacaactacacgctccgggtgcgcgtgcgcgccaaccaaaacaacacgctctggagcgagcccatgatttatgcgttcgccaccgctccggcgccgccgcgccgccctcctcgcgtcacctacggcagcttctatgtctactcgtcggagaaggctatgcgcttctactgggagcccctggaggagcacgagctgaacggaccggactttcggtactccatcagcgagtaccgcatcaacggaacagcagtggatcctggcctcatcaaggtggagtccaactcggcgatgatcgatcactggagcatgagtgccgtccatcacttcctcatccgcagcagcaatagccagggtctgtctgtgaacgccactccgatgacgatcggccccattagcaatcgggacttcaaggtgcgcgagcccaggaacatacgcagcgtctatcatccgaccaacaagagctacacgctcagctgggatccgccgagcgatcagcgggaactgcagaactacaccgttttctggtgcgtgcccaagccgggcctgcagtcggaatgcgagggttcgatacgcttcgcggaggtcgcaagcggtctgcatcacttcaccacgtcaccggaccaactgctcacgctgcacatggccgtgtcggccaactaccaatcgcataatacgggcctacactgggcgatctgcagtagcgacaagaaggacgatttggccaagatggagccgtcgatcgatgtggccaccagcacctcactgacggtcagttggtcggagcgcgtctgcgcagtgatcctggccggctataatctgacctactgccagcgctcggccggccgtccggacaattgcacgacggtgaccatcgatcgctatacgaacaagcacgtcatccagaatctggtgccctacacggactacagtgtcaagatgctgatgtattcggactcgcgggtcagcaagtacagcgacgagctggtcaaccgcaccggagaggcggcgcctagccagccgcgggagttgcagctaatccgcgtgaccagcgacagcgtggagctcgcctggaagccaccgctgctggccaacggcgtggtgcgcgcctacgagggcaccttccgctcgctacatgacaacgtgaccgatacattccgcgtaagcgcctccgccgacgagctggtgaacaacgagaagcccatcacctaccggctgggcaatctcaccgcattcaccaagtacgagattagcgtgcgtgcgcggaccgtctatccatcggagcccagcaatgtgatcctcttcagcacggccatcggagttccctcgccgccacaactgtacgtgatcaacaatccggatcagagctcacgtctcgactgggaaccgccaaggacgccggccggacgcattgatttctacgagatctcgctgcgcgacaacaacgccagctgcctgacaagcaccattctgccgggcaggaacctatcctatgtgatggccacgccgcgctgcaccagccacaatcccttccagctagcggtgcgtgccatcaacgtggagcagcatccgcagttgaacggagcggatgcagcggaaggtgccgttttgcttatgtcgaccaacggcaagggatgcgaggcacgcaccgatgcgctcggcgaagaggagcggctgcagttcgaggcctacgctgccaacatgaccgcctaccggctctacagatccgattggggcatctacggattcatctgtacaccggacacgcacagcgtgaaggccatgtaccagaccattgaggtgaccgtggcgattctcgtgctgggcgtcatcttctacctcgtgtacaagaaataccgcaagatgtccgatatcggtctagtgctgccgcagggaatcatggagaccatgaagaagcccatagacatgggtggcctgggattgggcctgggtccagactcgtccgtcagcggaggcatcgtgtgcacacgggtggacgactcgccgccatacacgccgcaggatctgccgcacgacttcagtagctgcggcagtgagagctcgaaactgctgctgcgcacagcgtcctcctctggtggcggcggctgcgtggatcgcgatggatacgatgacaatcacgagacagggccaattagcgcagttggtccgcccaccagctacctggccatgcggcatggccttctcgtccagaacgacagggagcgcgagagggagagggatcgtgagcaggagagggagcgggagcagcagcaacagcagcgcgagagcgaaatggatcgggagcagagttgcaccaatggttacatcaagcccacacagatgaagagctggggcggcaacggtccctcggataatgatcacacgttctcagttccttcgactgcaatgaccgctccgatgtcccagccgctgtcccagattccgctcagcggctacgtgcccgttcccattccacaatctcggttcaatccggctccagttcaaccgtttgggtcgccagcagtaccttccgccgccaccgcagccgctgcgtcgacctttttcccaccggcccacttgctcaacatggacaactacgtgcaggcctcggatctgcacaagctgaagccgctcgtcgcagctccgttgtcgcaaaccggaggaccagcctttgcgggatcttcgccagcaacttcgccaccgctacagctaccgccggttcacgccgcaagtccagctgccgccacgcccaaaatggctgacatcggctataccaccatggagcagttgcagctcactgggctgataaagccacctctggccgccaccgtgggatcgccgacgcacgccgctggtggggcgccgggaggcggcaaccagcactctcgcctccagccgcaaatcaatggctacgtaacgccgcaggatctgaacgccatggcccacaatcggcacgtcctctaa

SEQ ID NO: 111 - protein, 1282 aa, Drosophila melanogaster
MVAQEQLVLLLMLLAGCRGGANAILDPGWVIPSKVEQLIGGDFNLSCTLNEDYFNGKSAEDCPVEKLYFTGGGRVYRDSKHIRILNNTTILFSDTNAVEQENDYHCMCDEYVINKSKVYVGTRPLLVRDFNCLDYDFQFMVCNFTQPPNTVITKYNISYNTNNDWRYSNTLDCNFDSAPVVTCNLTDDNYKRFSETFYFRLSISNALGHETQPITINHFERLVPARPGQNLTLLNRTESSVCLSWEMPRRSNYNRGLVWQVRVTPQNFEPITRPSWRNHTLTIKDTLCLTELPFAGYNYTLRVRVRANQNNTLWSEPMIYAFATAPAPPRRPPRVTYGSFYVYSSEKAMRFYWEPLEEHELNGPDFRYSISEYRINGTAVDPGLIKVESNSAMIDHWSMSAVHHFLIRSSNSQGLSVNATPMTIGPISNRDFKVREPRNIRSVYHPTNKSYTLSWDPPSDQRELQNYTVFWCVPKPGLQSECEGSIRFAEVASGLHHFTTSPDQLLTLHMAVSANYQSHNTGLHWAICSSDKKDDLAKMEPSIDVATSTSLTVSWSERVCAVILAGYNLTYCQRSAGRPDNCTTVTIDRYTNKHVIQNLVPYTDYSVKMLMYSDSRVSKYSDELVNRTGEAAPSQPRELQLIRVTSDSVELAWKPPLLANGVVRAYEGTFRSLHDNVTDTFRVSASADELVNNEKPITYRLGNLTAFTKYEISVRARTVYPSEPSNVILFSTAIGVPSPPQLYVINNPDQSSRLDWEPPRTPAGRIDFYEISLRDNNASCLTSTILPGRNLSYVMATPRCTSHNPFQLAVRAINVEQHPQLNGADAAEGAVLLMSTNGKGCEARTDALGEEERLQFEAYAANMTAYRLYRSDWGIYGFICTPDTHSVKAMYQTIEVTVAILVLGVIFYLVYKKYRKMSDIGLVLPQGIMETMKKPIDMGGLGLGLGPDSSVSGGIVCTRVDDSPPYTPQDLPHDFSSCGSESSKLLLRTASSSGGGGCVDRDGYDDNHETGPISAVGPPTSYLAMRHGLLVQNDRERERERDREQEREREQQQQQRESEMDREQSCTNGYIKPTQMKSWGGNGPSDNDHTFSVPSTAMTAPMSQPLSQIPLSGYVPVPIPQSRFNPAPVQPFGSPAVPSAATAAAASTFFPPAHLLNMDNYVQASDLHKLKPLVAAPLSQTGGPAFAGSSPATSPPLQLPPVHAASPAAATPKMADIGYTTMEQLQLTGLIKPPLAATVGSPTHAAGGAPGGGNQHSRLQPQINGYVTPQDLNAMAHNRHVL

SEQ ID NO: 112 - DNA, 2532 bp, Drosophila melanogaster
  CDS (1)..(2532): CT34063
atggccacgggcggcggtggcagcggccacgggggagcgggatccgccggaaatgctgaccaccacaagcgcaacaccttcaccagctatgtggcaccgctacccggagatttgcgcgccacagcggacacgaacgaatggtgcctgcccagcgatttgagggacgtccatctggccaagccgcgactgctgcacggcgagcagatagtggcatcggcaccagcctacatgtactcaccgatcgatccgatggacagcagcggaggcagtggctctacgctcagcgccatatcatctgcgtccggtacgccagcggatcgtcatcacaaagaggccaccttcggactgttgagtgtcaccaattttaagctggcctttgtgccgctgcatgaaaagcgtaatcaagcgatcacagcgccactgatcgatctatatcaggagaatacctatttgggccgcaatgagattacgctaaacaacatcgatcatatctataccattaccgagctgggacgggcggccagtgcgctgcaggcggcgcgaggcatggccagccatgcgggcatgagcaggcgcaaaaaactggagcccttcaagcagcagaacatcagcggtcgcatcgccgccctgcatatcgtgtgcaagaactttcgcctgctgaaattcgccttccagcagcaggattcgaagatgtttggggccagtgatcagggcaaactgattgcctcggccctggtgcgtttcgcttatccaatgcggcatgatctgagcttcgcctatgctcatcgagagccatactattcgacactgggcgcatccggcactagtatgtatgcgacgaaaaacgactgggccagagagctgatacgctgcggcgccaccgagtggcaggtggttagctgtgccagtgtccagctgctgcagaatcccctccaggcgggcaagtacactgtgccgccgcattttgtcataccgaagagctgcagcgtggatcgattcctggatctgtcgcgcgccttctgcgattcacgagctgccttctgggtgtatagctatgggagcagcgcggcactggtcagattagctgaactgcagccggctgcgcagcaggacaccaaatcggagaatgtgatgctggagctggtgcgcaaatgtgatgcggggcgacagctgaagctcctacagctgacggatcgcctgccgagcattcaggatgtgctgcgcgcctatcagaagctgaggcgcctatgcacgccggaaacgccggagaagtttatgctgcaggatgacaagtacctgggactactcgaaaagaccaactggctgttctatgtgtcgttgtgcctacgctatgctagtgaagcgtctgccacgctgcgcagcggcgttacctgtgtcctccaggagtcgaatggccgtgatctctgctgtgtgattagcagtctggcgcagctattgctcgatccgcatttccgtactatcgatggcttccaatcgctggtgcagaaggagtgggtggccctggagcatccgtttcagcgacgcctgggtcatgtctatcctgcccagccggccggcggtaatgccgaactattcgacagcgaacagagtccagtgtttctgctcttcctcgattgcgtgtggcagctgttgcagcagttccccgacgagttcgagttcacgcagacatacctgaccacgctgtgggactcgtgcttcatgcccatcttcgataccttccagttcgatacgcaggcccagcgactgaaggcggtgaccgactcgcagctcgtcctgcgtcccgtttgggattggggcgagcagttctcggacaaggacaaaatgttctttagcaatccgctgtaccagcgccaaaggggcgatcttggcgcccaggcggctgccgtggcgcatcgcagatccctggcggtgggtagtaagggagcgcatggcgccgctagtggtgtcacaccctcgcgcaacaccatcaatccgcagctctttgcgaccgcttcgtcagtgccgcaggatcgttacctgcagccggcacatcgcatcttcgatctgcaggtgtgggatcagtgctactaccgctggctgcccattttggatatacgcggcggcggccagccgcaggtggatctctatcatcgcctgctgctgagcaacatagcaaaggtacagcgctgcctggattatcaaaactttgacgatctacccgatgcgtattacgagttcgccggcgaatcgcgtcccaatcagcacaaggacgagaagcccgacaaggaggacgaggccgagttcgtcgacggtgtggagcggcgcaggaagccgacggcgaaggccgccacacccactagcggactcacatcggttaccggcaatctgcagctatcgaccctgtcgtcgttctttcccttcgggaatcccatcgccggagatgcaccgctccagctgtacgacattctgagcagcagcagcgagctgctgatggagacctcatcctttctggacaagtcgtccattgtctaa

SEQ ID NO: 113 - protein, 843 aa, Drosophila melanogaster
MATGGGGSGHGGAGSAGNADHHKRNTFTSYVAPLPGDLRATADTNEWCLPSDLRDVHLAKPRLLHGEQIVASAPAYMYSPIDPMDSSGGSGSTLSAISSASGTPADRHHKEATFGLLSVTNFKLAFVPLHEKRNQAITAPLIDLYQENTYLGRNEITLNNIDHIYTITELGRAASALQAARGMASHAGMSRRKKLEPFKQQNISGRIAALHIVCKNFRLLKFAFQQQDSKMFGASDQGKLIASALVRFAYPMRHDLSFAYAHREPYYSTLGASGTSMYATKNDWARELIRCGATEWQVVSCASVQLLQNPLQAGKYTVPPHFVIPKSCSVDRFLDLSRAFCDSRAAFWVYSYGSSAALVRLAELQPAAQQDTKSENVMLELVRKCDAGRQLKLLQLTDRLPSIQDVLRAYQKLRRLCTPETPEKFMLQDDKYLGLLEKTNWLFYVSLCLRYASEASATLRSGVTCVLQESNGRDLCCVISSLAQLLLDPHFRTIDGFQSLVQKEWVALEHPFQRRLGHVYPAQPAGGNAELFDSEQSPVFLLFLDCVWQLLQQFPDEFEFTQTYLTTLWDSCFMPIFDTFQFDTQAQRLKAVTDSQLVLRPVWDWGEQFSDKDKMFFSNPLYQRQRGDLGAQAAAVAHRRSLAVGSKGAHGAASGVTPSRNTINPQLFATASSVPQDRYLQPAHRIFDLQVWDQCYYRWLPILDIRGGGQPQVDLYHRLLLSNIAKVQRCLDYQNFDDLPDAYYEFAGESRPNQHKDEKPDKEDEAEFVDGVERRRKPTAKAATPTSGLTSVTGNLQLSTLSSFFPFGNPIAGDAPLQLYDILSSSSELLMETSSFLDKSSIV

SEQ ID NO: 114 - DNA, 1188 bp, Drosophila melanogaster
  CDS (1)..(1188): CT3509
atggcggtctttggcatggtctcggctgtgtccggctttatcaagatacgctatctgctggacaaggcggtcatcgacaacatggttttccgctgccactacaggatcacgacggccattctgttcacttgttgcatcatcgtcaccgcaaacaatctgatcggcgatcccataagttgcatcaacgacggcgccattccgatgcacgtaatcaacaccttctgctggatcacctacacgtacacgatacctggccagcagcatcggcaaatcggaacggacgtggctggtccgggattgggcaatgagtacggccaggagaagcgctatcacagctactatcaatgggtgccattcgtgctattcttccaggggctcatgttctacgtgccccactgggtttggaagaacatggaagacggcaagatccgcatgatcaccgatggactgcgcggcatggtcagtgtgccggatgactatcggcgtgatcgccaggaccggatcctcaagtatttcgtgaacagtttgaacacccacaacggctactcgttcgcatactttttctgcgaactgcttaactttatcaacgtgattgtgaatatctttatggtggataagtttctgggcggtgctttcatgtcctacggtacggatgtgctcaagttctccaacatggatcaggacaagcgcttcgatccgatgatcgagatctttccccggctcaccaagtgcacgttccacaagttcggtcccagtggatcggtccagaaacacgacactctctgtgtgctggcactgaatatcctcaacgagaagatctacatcttcctgtggttctggtttatcatcttggccaccatctccggcgtggctgtgctctattcactggtggttatcatgatgcccaccactcgggagaccatcatcaagcgttcttatcgctcggcacaacggaaggaaatcgccggactggttaggcgtttggagattggtgacttcctgatcttgcacttcctgagccagaacctcagcacaagatcgtacagtgacatgctgcagcagctctgcggtctgctaggagcatcccgaacaccatccgcaccatcgacccttgaaatgaaccgcatcagccatccgatttatccgcccgtggagaccttcggcggtggcaaggagacggagacataa

SEQ ID NO: 115 - protein, 395 aa, Drosophila melanogaster
MAVFGMVSAVSGFIKIRYLLDKAVIDNMVFRCHYRITTAILFTCCIIVTANNLIGDPISCINDGAIPMHVINTFCWITYTYTIPGQQHRQIGTDVAGPGLGNEYGQEKRYHSYYQWVPFVLFFQGLMFYVPHWVWKNMEDGKIRMITDGLRGMVSVPDDYRRDRQDRILKYFVNSLNTHNGYSFAYFFCELLNFINVIVNIFMVDKFLGGAFMSYGTDVLKFSNMDQDKRFDPMIEIFPRLTKCTFHKFGPSGSVQKHDTLCVLALNILNEKIYIFLWFWFIILATISGVAVLYSLVVIMMPTTRETIIKRSYRSAQRKEIAGLVRRLEIGDFLILHFLSQNLSTRSYSDMLQQLCGLLGASRTPSAPSTLEMNRISHPIYPPVETFGGGKETET

SEQ ID NO: 116 - DNA, 2805 bp, Drosophila melanogaster
  CDS (1)..(2805): CT34434
atggccgaatccgttaaaagtcaatcgctctctgcattgacggaggggcagcacgacgacggtggttcaacagcaacatcagcgacattggctaataaaaccagtgggaccaacacgacaagtgcatccaatcactcgtcccagaggcgacgcaacaacaacacaaacagcaacagaaacaagagtcaccacaaaaacgagaaacgcaacgcaccggctacatcaggccccgctgtaagctcctccgtcgacgttgtacccgccacctcgactgcatctgcaacctctacccgtcggtctcgcagtcaaggtcgccactcctccgccgcagccctcagcagcaaggagtcacaaatccccaagcgctccgtgggagccatccgctccccatcttcaccagcattcaactccataccggtcgtcagtgatcaatcgctatcgcccggcagtcgtaagcgccagcttaaccagcacaacaacagtaacaacaaagccagcagtagccaccaatcggcgcccgggggagatcagctggtttgcgcgccccttaaaaaacgccgcttgcagcagtctttgggatccggtatctgcgagggagcggtagaaatcaacttaggtgcagcaagctttgaccacactcctcgtcaggcatccggagactgtgttgcacagcgcactcgatctaagaccatttcgccggaggagttgccaagcacaagcagcgctgcggcagcacgccatcaccagattcgccccagtgccagctctaccagcttctcgagcagccatcgaaacaaacgaaaggccagtattggaggatcaatagctgcggtcgagaccactccgcatagaggaacagcagctgctcgcgccggacgcagcggtaacctgctaaactattacagaaaaacgcgtaaggttagccacacacgctcctcccaaaagtcggaaaagcagtctataccagcggaggacactacggccaaccgaaacggatcagccggatccggatccagtagcaagtctggtgtgatacccaagaacaggaagagcctgcgtcattcgcagcagaacctgctggacacagaggcggcagaagtagagagtgctgctgctgaaactggaggtgaacagcagtcggagcacggaaatctggacgtgatcgaccaactgccgacccctgaagctggtcctaatcaatcagaggcatcaggaatccacaaccagagtcaattggaggcggatcgccagcccgtggtgcaggacgaagacgacgaggaggacgacgaggaagaggaagaagaggaggaagaggaggtgggcttctacgggattgtaaactctgctggctcgtcatacgaggaagacacacaaatagttgccgaggaggacgagatcacaacggaggaggaagttgacgacgaggacgacgacgaaatcgaggaagaagacctctcggagagcgaattcgcgcagcaactgattggtgaacttggtggagaacgacaacaacctcaacgtgccaccaacaacgcaaaaaaaaccaagaacaacacaccggcggtagcagcagccagcactatcaaggcgacaacaacagcaacaacgtcgtccggttatcaacaacgtgccgccccccatggacagggggcggcgccaggcgctggaggcggcggtccgcgtgccacgcgcagcagcaacagcaactccagcaacaacgttgttgactacagcattatgccgcacctcacaacggtcgcaacaaccacaccacatgccttgacaccgcaacagcaccaacaacaacgacaaccgccacaacctccgtcgcatcagcaacaacaagtacaccaacaacagcagccacctcaattgttgcccacacatcagtttgcacacttgtcgtcctttgtgacaccgacagcagcggcagcagcagcagcagcggcggcccactatcccccagcttctgctgctgccgcttactttgcacagcagcaacaccatcagcatcaacatcagcatcagcaacaacacgtgcagcaggcacaggcaccgcagccgcactattaccatagttcagtggctgtgttgcatcaacctccaccgcaccattttacctccacaggagcaggaccaccgccagcactctttcagcagcaggcaccgccgcagctaacccgctacacgccagcaacagctacaacagcggctacgtttgtgcctccgcagcagcaacaggttgtctacaacccacaacagcagcagcactcatcactgcgacgcagttcacgtggcaagacgggttcttgtgtgagttcggcagcggcagcacagcagcagcagcaccatcagcagcagcaacatagctccgctgctgctgctgtacagcagcaattgctgccaccgcctggtacctatcaataccaacaggtgggcggcaataccgttgtagttgccgtgcgtcatcagcaacagttgcaacagcagcagcagcaacagcagcaactggctttacatcatcagcatcagcagcagcagcatcagcaacagcagcagcagcatcagcagcagcagcatcagcaacagcagcgtgccactctcgtgcagccaggattcttgttcagctatcgcagcaatcaaccccagcagcaacagcaaccagcgcagcaaatacatcagggccccaaagtgacgcatagcagtggtaagaagatgaaggaagaggaagagcaaaataaggatgaaaggacaagagaccgcaagcaaatcaaaatccagggtctcctcaatcattttccataa

SEQ ID NO: 117 - protein, 934 aa, Drosophila melanogaster
MAESVKSQSLSALTEGQHDDGGSTATSATLANKTSGTNTTSASNHSSQRRRNNNTNSNRNKSHHKNEKRNAPATSGPAVSSSVDVVPATSTASATSTRRSRSQGRHSSAAALSSKESQIPKRSVGAIRSPSSPAFNSIPVVSDQSLSPGSRKRQLNQHNNSNNKASSSHQSAPGGDQLVCAPLKKRRLQQSLGSGICEGAVEINLGAASFDHTPRQASGDCVAQRTRSKTISPEELPSTSSAAAARHHQIRPSASSTSFSSSHRNKRKASIGGSIAAVETTPHRGTAAARAGRSGNLLNYYRKTRKVSHTRSSQKSEKQSIPAEDTTANRNGSAGSGSSSKSGVIPKNRKSLRHSQQNLLDTEAAEVESAAAETGGEQQSEHGNLDVIDQLPTPEAGPNQSEASGIHNQSQLEADRQPVVQDEDDEEDDEEEEEEEEEEVGFYGIVNSAGSSYEEDTQIVAEEDEITTEEEVDDEDDDEIEEEDLSESEFAQQLIGELGGERQQPQRATNNAKKTKNNTPAVAAASTIKATTTATTSSGYQQRAAPHGQGAAPGAGGGGPRATRSSNSNSSNNVVDYSIMPHLTTVATTTPHALTPQQHQQQRQPPQPPSHQQQQVHQQQQPPQLLPTHQFAHLSSFVTPTAAAAAAAAAAHYPPASAAAAYFAQQQHHQHQHQHQQQHVQQAQAPQPHYYHSSVAVLHQPPPHHFTSTGAGPPPALFQQQAPPQLTRYTPATATTAATFVPPQQQQVVYNPQQQQHSSLRRSSRGKTGSCVSSAAAAQQQQHHQQQQHSSAAAAVQQQLLPPPGTYQYQQVGGNTVVVAVRHQQQLQQQQQQQQQLALHHQHQQQQHQQQQQQHQQQQHQQQQRATLVQPGFLFSYRSNQPQQQQQPAQQIHQGPKVTHSSGKKMKEEEEQNKDERTRDRKQIKIQGLLNHFP

SEQ ID NO: 118 - DNA, 561 bp, Drosophila melanogaster
  CDS (1)..(561): CT34588
atggcgggcccacttttgtggcaaaacttcaaggtgttcgtcacccgctacccgattatgcgcggcatgatatcgtacagcctgatctggcccacgggcagcctcatccagcaaacggttgagggcaggcgctggggcacctacgactggtggcgcgtgctccggttcagcatgtacggtggtctgtttgttgctcctaccctctacggatgggtcaagatttccagcgccatgtggccgcagacatcgttgaggacgggcgtcattaaggcggcggtggagacgatctcgtacacccccggcgcgatgacctgcttctactttatcatgagcctcctggagtccaagacggtggagcaggcggtagccgaggtcggcaagaaattcctgcccacgtacaaggtggctctgtccgtatggccactggtggccaccatcaacttcaccctgatccccgagcgcaaccgggtgccattcatcagcgcgtgcagcctgtgctggacctgcttcttggcctacatgaagcacctggagcaccacgaggtggacggggccatttaa

SEQ ID NO: 119 - protein, 186 aa, Drosophila melanogaster
MAGPLLWQNFKVFVTRYPIMRGMISYSLIWPTGSLIQQTVEGRRWGTYDWWRVLRFSMYGGLFVAPTLYGWVKISSAMWPQTSLRTGVIKAAVETISYTPGAMTCFYFIMSLLESKTVEQAVAEVGKKFLPTYKVALSVWPLVATINFTLIPERNRVPFISACSLCWTCFLAYMKHLEHHEVDGAI

SEQ ID NO: 120 - DNA, 411 bp, Drosophila melanogaster
  CDS (1)..(411): CT43287
atgcgcgaacttaacaagcagcagtcgcaggacaccacggactcgggcgtcgaaaagggcgactatccgcgggccaccaatggcgtggtcttcggcgccatagttacattcgccagctttttcgtgctgatgatgtccttttgctcgccgtactggatcgagtcctacgaggagacgcgggccagcttcaagaacatgggcctgtggcagtactgctttaaggacttcgtgtaccccaagtacgcgttcttgaagcagttcaccggttgccacaacatcttctcgcacgtgagtacagcaaactggccggttcttatccttgtcctgatcttctcccactcgtacaggagtattacgttatccgtgagtatctgctgcccggctggctcatggcggtgcagggcttcgtaa

SEQ ID NO: 121 - protein, 136 aa, Drosophila melanogaster
MRELNKQQSQDTTDSGVEKGDYPRATNGVVFGAIVTFASFFVLMMSFCSPYWIESYEETRASFKNMGLWQYCFKDFVYPKYAFLKQFTGCHNIFSHVSTANWPVLILVLIFSHSYRSITLSVSICCPAGSWRCRAS

SEQ ID NO: 122 - DNA, 771 bp, Drosophila melanogaster
  CDS (1)..(771): CT34589
atgcgcgaacttaacaagcagcagtcgcaggacaccacggactcgggcgtcgaaaagggcgactatccgcgggccaccaatggcgtggtcttcggcgccatagttacattcgccagctttttcgtgctgatgatgtccttttgctcgccgtactggatcgagtcctacgaggagacgcgggccagcttcaagaacatgggcctgtggcagtactgctttaaggacttcgtgtaccccaagtacgcgttcttgaagcagttcaccggttgccacaacatcttctcgcacgagtattacgttatccgtgagtatctgctgcccggctggctcatggcggtgcagggcttcgtgaccatgtccttcatcatcgtgttccttgtgctggccctgctctcgcttaccatcatccgactgcctcttaaggccgttctgcagtacgagtggctgctcgtccgcctctcctacatgggcaccgccatctcgtctctgttcatgtttttggccgtatgcatcttcgggggctgcgcctaccgccgcgactggatgatgtaccccaagttcaacgtgctgggctggtcctacgccctggccgttgtcaccttcatgctccttggtctagccgctctgatcctgcagcgcgaggcccggcaagcctacgacgcccgcggcgagcagaagaacctggtaatgcaaatggagatgcaggagccgggttaccagccgccgcgccaccaccacagccagtcgcggagcctgcagggctacatataa

SEQ ID NO: 123 - protein, 256 aa, Drosophila melanogaster
MRELNKQQSQDTTDSGVEKGDYPRATNGVVFGAIVTFASFFVLMMSFCSPYWIESYEETRASFKNMGLWQYCFKDFVYPKYAFLKQFTGCHNIFSHEYYVIREYLLPGWLMAVQGFVTMSFIIVFLVLALLSLTIIRLPLKAVLQYEWLLVRLSYMGTAISSLFMFLAVCIFGGCAYRRDWMMYPKFNVLGWSYALAVVTFMLLGLAALILQREARQAYDARGEQKNLVMQMEMQEPGYQPPRHHHSQSRSLQGYI

SEQ ID NO: 124 - DNA, 1473 bp, Drosophila melanogaster
  CDS (1)..(1473): CT34599
atgcgagggagctggcccaggcttgggttcccggcgctgctcctgctcctccatctgctgaccggctcggatgccgccgtccggaatgggactgcaaagcgggaaattggcgattcccggggaagcagcggcacctgcgtcaaagggttcctgcaggagatcctgccactgccagcgacttgtccgcctgaggtgctcgggatgaggggcgccgtgtatatcctttacgacgtaaacatctccgagggcttcaacctgcgccgagacgtctatattcgcatggcggtgttcgtgcgccggctgcagaggagaaggcgctttcgccatgtgcgccttgtgctgccgccgtggccccgcctctaccactggcactcgcagggcctgcagcaatctggactgccctggagccacttcttcgacttggccagtctgcgtcgctacgcgcccgttctggactacgaggaattcctggccgaacagcgcttattcggcaatcctggcgcaccgctggtccatgtagggcacgctttccggttgcagcactacgaggtcatgctagaacagggcatatttcgggacaagttcgagcgcgtcacggacaagccgtgcagcgagggatccctgtcgggaggaccattgctgcagcaggcggagctgcgcgtggggcgtttccactgcgttcggttccagggcagcgccggactgctggagaagttgcttcgcgaggcgatcgacgaggacacggcgggaccggaggacgtcgacgacatgcgcacgtacgctttgctcagcgccgaaacggtgcttcacgaccactggggcgacgagcacttttggcaggcccggcgttccatgcgtttcgcccgtcggctcgaacaggtggccgccgacttccgacggcaggccctggacaccacagatgcttcggccggtgtccaacggcccgccatgtgggagctggagcggccgaagcgcaacgccaagggcggcgattacctctgcgcccacctaaggcggggcgactttgttcgctcgcgggatgcgaccactcccaccctgaaggcggctgcccagcaggtcaagcagctgctgcgcgggtttaacatgaccacagtgttcctggccactgacgccacgccatacgagctgatggaactaaaggagctcttctaccgcttccgcctcgtgcacttcgcgccggagtcgaatgtccaacgaagggagctgaaggatgggggcgtggcggtggtggaccagctggtctgcgcctacgcccgctactttgtgggcacctacgagagcaccttcacgtaccgcatctacgaggagcgcgagatcctcggctttacccaggccagcacctttaacacgttctgcaaggccttaggcggcagctgctcgcgcaacgccgtgtggcccattgtgtgggcggatggcgatagcgacagcgaggaagattccgacccgtactga

SEQ ID NO: 125 - protein, 490 aa, Drosophila melanogaster
MRGSWPRLGFPALLLLLHLLTGSDAAVRNGTAKREIGDSRGSSGTCVKGFLQEILPLPATCPPEVLGMRGAVYILYDVNISEGFNLRRDVYIRMAVFVRRLQRRRRFRHVRLVLPPWPRLYHWHSQGLQQSGLPWSHFFDLASLRRYAPVLDYEEFLAEQRLFGNPGAPLVHVGHAFRLQHYEVMLEQGIFRDKFERVTDKPCSEGSLSGGPLLQQAELRVGRFHCVRFQGSAGLLEKLLREAIDEDTAGPEDVDDMRTYALLSAETVLHDHWGDEHFWQARRSMRFARRLEQVAADFRRQALDTTDASAGVQRPAMWELERPKRNAKGGDYLCAHLRRGDFVRSRDATTPTLKAAAQQVKQLLRGFNMTTVFLATDATPYELMELKELFYRFRLVHFAPESNVQRRELKDGGVAVVDQLVCAYARYFVGTYESTFTYRIYEEREILGFTQASTFNTFCKALGGSCSRNAVWPIVWADGDSDSEEDSDPY

SEQ ID NO: 126 - DNA, 993 bp, Drosophila melanogaster
  CDS (1)..(993): CT34602
atggcccgggaaaagtccgcgcactttaatccatacactttccgcgaaaatttcgatagactgattctcagtgtgaccgctctgcgtcggagtgaaaaaaccgaaaaagtcggaacgcgtcgcgatacggaaaaaaaccgtttaacgcgaacgcaacaccgattctctgcatgccaacgtcgccaacttcaacccggaaatcggccattttgtcaaaactcccagcggcatctagacgtccgtaactctttccacgttaacatgtcgggaggcttagatattctgtccctcaaggaggacgacatcaccaagatgttggtggccaccacccatctgggttccgagaacgtcaacttccagatggagcagtacgtgtacaagcgccgcgctgatggcgtcaacatcctcaacctgggcaagacctgggagaagctgcagctggcggcccgcgccatcgtggccatcgataacccctcggacatcttcgtcatctcgtcgcgtccgatcggccagcgcgcggtgctgaagttcgccaagtacaccgacaccactccgatcgccggccgcttcacgcccggtgccttcaccaaccagatccagcccgctttccgcgagccgcgtctgctggtggtgaccgaccccaacaccgatcaccagcccatcatggaggccagctacgtgaacatccccgtgattgccttcacgaacaccgactcgcctctgcgctacatcgacattgccattccgtgcaacaacaagtcggcccactctatcggtctgatgtggtggctgttggcccgcgaagtgctccgcctgcgtggcaccatctctcgcagcgtcgagtggcccgtagtcgtcgatctgttcttctacccgcgatcccgaggaggccgagaaggaggaggccgccgccaagggagctgttgccgccacccaagattgaggagggccgtcgaccacccgggtcgaggagaccaccaactgggccgataa

SEQ ID NO: 127 - protein, 330 aa, Drosophila melanogaster
MAREKSAHFNPYTFRENFDRLILSVTALRRSEKTEKVGTRRDTEKNRLTRTQHRFSACQRRQLQPGNRPFCQNSQRHLDVRNSFHVNMSGGLDILSLKEDDITKMLVATTHLGSENVNFQMEQYVYKRRADGVNILNLGKTWEKLQLAARAIVAIDNPSDIFVISSRPIGQRAVLKFAKYTDTTPIAGRFTPGAFTNQIQPAFREPRLLVVTDPNTDHQPIMEASYVNIPVIAFTNTDSPLRYIDIAIPCNNKSAHSIGLMWWLLAREVLRLRGTISRSVEWPVVVDLFFYPRSRGGREGGGRRQGSCCRHPRLRRAVDHPGRGDHQLGR

SEQ ID NO: 128 - DNA, 1599 bp, Drosophila melanogaster
  CDS (1)..(1599): CT34626
atggtattaattgctgcggctgtctgcacgaagaatggcaaagtgattctgtcacgtcagttcgtcgagatgacgaaggcacgcatcgagggactgctggctgcctttcccaagctgatgactgctggcaagcagcacacttacgtggagacggactccgtgcgctacgtctaccagccgatggagaaactatatatgctgctcatcaccactaaggccagcaacattctggaggatctggagaccctgcgcctcttctcgaaagtgattcccgagtacagccactcgctcgacgagaaggagattgtggagaatgccttcaatctgatcttcgcatttgacgagatcgtggcactcggctacagggagagcgtcaacttggcccagatcaagaccttcgtggagatggactcacatgaggagaaggtctaccaggcagtgcgtcagacgcaggagcgtgatgcgcgccagaagatgcgcgagaaggccaaggaactgcagcggcagcgcatggaggccagcaaacggggtggtccctccctgggtggcattggcagccgcagcggcggctttagcgccgacggaattggcagtagcggcgtgagcagcagttccggtgcctccagcgccaacaccggcatcacctccatcgatgtggacaccaaatccaaggcggctgccagtaaaccagcttcccgcaatgccctcaagctaggtggcaagtccaaggacgtcgatagtttcgtggatcagctgaagaacgagggcgagaagattgccaatctggcaccggcggcgcccgctggaggttccagtgctgcagctagcgccagtgcagcggccaaggcagctatcgcgtcggacattcacaaagagagcgtacatctgaagattgaggacaagctagtagtgcgtctgggacgcgatggtggcgtgcagcagttcgagaactcgggcctcctgacgttgcgcattacggacgaggcctacggacgcattttgctgaagctgtctcccaaccacacacagggcctgcagttgcagacccaccccaacgtggacaaggagctgttcaagtcgcgcactaccatcggactaaagaacttgggcaagccgtttccccttaacaccgatgtgggtgtgctcaagtggcgcttcgtctcgcaggacgagtcggcagtcccgctgaccattaactgctggccatcggataatggagagggtggatgcgatgttaacattgagtatgaactggaggcgcagcagctagagctgcaggacgtggccattgtcattcccttgccaatgaatgtgcagccttcggtggcggagtacgacggcacctacaactacgattcacgcaagcatgtgctccagtggcacattccaataatcgatgccgccaacaagtccggttctatggagttcagctgcagtgcctccattcccggtgacttcttccccttgcaggtgtccttcgtctcgaaaacgccgtatgcgggcgtcgtggcccaggatgtggtgcaggtggacagcgaggcggcggtcaagtattcaagcgagtccattctgttcgtggaaaagtacgagatcgtgtaa

SEQ ID NO: 129 - protein, 532 aa, Drosophila melanogaster
MVLIAAAVCTKNGKVILSRQFVEMTKARIEGLLAAFPKLMTAGKQHTYVETDSVRYVYQPMEKLYMLLITTKASNILEDLETLRLFSKVIPEYSHSLDEKEIVENAFNLIFAFDEIVALGYRESVNLAQIKTFVEMDSHEEKVYQAVRQTQERDARQKMREKAKELQRQRMEASKRGGPSLGGIGSRSGGFSADGIGSSGVSSSSGASSANTGITSIDVDTKSKAAASKPASRNALKLGGKSKDVDSFVDQLKNEGEKIANLAPAAPAGGSSAAASASAAAKAAIASDIHKESVHLKIEDKLVVRLGRDGGVQQFENSGLLTLRITDEAYGRILLKLSPNHTQGLQLQTHPNVDKELFKSRTTIGLKNLGKPFPLNTDVGVLKWRFVSQDESAVPLTINCWPSDNGEGGCDVNIEYELEAQQLELQDVAIVIPLPMNVQPSVAEYDGTYNYDSRKHVLQWHIPIIDAANKSGSMEFSCSASIPGDFFPLQVSFVSKTPYAGVVAQDVVQVDSEAAVKYSSESILFVEKYEIV

SEQ ID NO: 130 - DNA, 1311 bp, Drosophila melanogaster
  CDS (1)..(1311): CT34665
atgcgagacagaatcaccctgcatggctatacgacaatgtccaatgctcgcgagctggcattgatcgagaaatgggctgacattgcaacgccggcgacgccgaatcggccaacactatcgccaacatcgccgccagcactccatcgatccatcgttaagttctgctgctgtccgcagcggaggcgctacaatctgaagcaggccaagagccacgggggtagcaacaagttgaatgtgaacacgctgcatgccagaaatatattcgtcgatagcgatttcagctatattgatgatgtgccgcggcgacgccaagattgccacagcgattacgacgattgcaactacgactccgactgtggcggcgataaagcagatgatgaggccaatgatatcgctgctgctccaagagacgacggaaatgtggcgctgatattaatgaatcaacgaaatctttccgaacaatggcggcaggacaacaaaggcaacagcaacagcaacaaagcagcaactaaaacttgcgctgtcacaaagagcccgcaaagtggcaatgagcaacagcaacaccagcagcagcagcagcaacagcagcagcagcgacaaccaacccaaagactaagcaatagcttgcaacagcagcagcagcaagagcaacaattgcaacagcaacagcaacagcaacatagcaataaggaaaatacactaagctacgacaacaacaacaagccgcactgtaattattgtaaattacccgacaccgccgagccccaaacgaatagcaatagcaactcgaaaattgattcaccgaagtcgtcgcagaataaaatgacaattacgacagcgacagacacagaaacagcaacggcaacaacagcaactgcaactggcgagtgtgggctgccagcagcaacatcccaagagtttgtgggtgctgccacagaagtgctgtgcaacgataaagcaacattgacagcggcgacaccagcggcaactgcaacaactgcagcaacaacacctaagccccgcattgcagcgcgtccgaccacgcccagccgccttaagactgtgatcaaaacgacaatggtgaagcgaagtcctagccatgactcaacggcaacagcagcacatgtgttgctgccgcacagctgcagcagcaacagcaacagcagcagcaacaacattggagcacatgacgagcccagacgttcggttagggagcgcatcgccgcctttgcggcaggaaatgggcagccaagtcaccgaaggtcatcagaactgaaagccagctcagatcctcgtcatttcctgttctaa

SEQ ID NO: 131 - protein, 436 aa, Drosophila melanogaster
MRDRITLHGYTTMSNARELALIEKWADIATPATPNRPTLSPTSPPALHRSIVKFCCCPQRRRYNLKQAKSHGGSNKLNVNTLHARNIFVDSDFSYIDDVPRRRQDCHSDYDDCNYDSDCGGDKADDEANDIAAAPRDDGNVALILMNQRNLSEQWRQDNKGNSNSNKAATKTCAVTKSPQSGNEQQQHQQQQQQQQQQRQPTQRLSNSLQQQQQQEQQLQQQQQQQHSNKENTLSYDNNNKPHCNYCKLPDTAEPQTNSNSNSKIDSPKSSQNKMTITTATDTETATATTATATGECGLPAATSQEFVGAATEVLCNDKATLTAATPAATATTAATTPKPRIAARPTTPSRLKTVIKTTMVKRSPSHDSTATAAHVLLPHSCSSNSNSSSNNIGAHDEPRRSVRERIAAFAAGNGQPSHRRSSELKASSDPRHFLF

SEQ ID NO: 132 - DNA, 1218 bp, Drosophila melanogaster
  CDS (1)..(1218): CT3729
atgacggtgacgaatcggatggaaatcgagtcggcctaccataaaggcgagggattccggtcctactacatccaaaagatcgaggaactgcagctggtggtggccgagaagcaccagaatttgagacgactgcaggcccagcgcaatgagctcaatgctaaagttcggatgctgcgggaggagctgcagctgctccaggaacagggtagctatgtgggcgaggttgtgaagcccatggacaagaagaaagtgctggtcaaggtgcatcccgagggcaagttcgtcgtcgatctggacaaaaacatagatatcaacgacgtaacccccaattgccgcgtggccctgcgcaatgagagctatacgctgcacaagattctgcccaataaggtggatccgctggtctcgcttatgatggttgaaaaagttcctgactccacatacgaaatggttggcggcctggacaaacagattaaagagatcaaggaggtgattgagttgcccgtaaagcatccagagctgtttgatgccttgggtattgcccagccgaagggagtgctcctttatggacctccaggtacaggaaagactttgctggccagggccgttgcccatcacaccgagtgcaccttcattcgcgtctctggctcagagctggtccagaaattcatcggcgagggttcgcgcatggttcgagaactctttgtaatggcccgggaacatgcaccatcaattattttcatggacgaaatcgattccattggctcgtcgcgtattgagtcaggttccggcggcgattccgaggtgcagcgtactatgctggagctacttaaccagctggacggctttgaggccaccaagaacatcaaggtgatcatggccaccaatcgcattgacatcctggatcccgctctgctgcgtcccggccgtattgatcgcaagatcgagttcccgccaccaaacgaggaggcgcgtctggacatcttgaagatccactcccgtaagatgaacctcacgcgtggcattaatctgcgcaagatcgccgagctaatgccaggcgcatcaggtgcggaagtcaagggcgtctgcacggaggccggcatgtatgcgctgcgcgaacgacgcgtccatgtcacccaggaggacttcgagatggctgtggccaaggtgatgcagaaggactcggagaagaacatgtctatcaagaagctgtggaagtag

SEQ ID NO: 133 - protein, 405 aa, Drosophila melanogaster
MTVTNRMEIESAYHKGEGFRSYYIQKIEELQLVVAEKHQNLRRLQAQRNELNAKVRMLREELQLLQEQGSYVGEVVKPMDKKKVLVKVHPEGKFVVDLDKNIDINDVTPNCRVALRNESYTLHKILPNKVDPLVSLMMVEKVPDSTYEMVGGLDKQIKEIKEVIELPVKHPELFDALGIAQPKGVLLYGPPGTGKTLLARAVAHHTECTFIRVSGSELVQKFIGEGSRMVRELFVMAREHAPSIIFMDEIDSIGSSRIESGSGGDSEVQRTMLELLNQLDGFEATKNIKVIMATNRIDILDPALLRPGRIDRKIEFPPPNEEARLDILKIHSRKMNLTRGINLRKIAELMPGASGAEVKGVCTEAGMYALRERRVHVTQEDFEMAVAKVMQKDSEKNMSIKKLWK

SEQ ID NO: 134 - DNA, 2127 bp, Drosophila melanogaster
  CDS (1)..(2127): CT34842
atgattcatgtgggcgaaaatacgtggaacctgcggatcctcatcacggatctgcaggtggagaagacgctgcgcgtgaagggtgaccagcacattggcggcgtaatgctgaacctggtggatccggagttgcccaaggattggtccgatcacgccctgtggtggcccgccaagaatatctggctgaccaggacgcggtccactttggaccaggccggagttcaatcggattcctttctgcacttcacgcccatgcacaagacactgagggtgcagatgcccgatcttcgttatctggactaccgcgtcaacttttcggccaaaactttcggagccgttgtgagcttgtgcaaggacctggacattcgctatccggaggaactgtctttctgcaagcccctggaaccggagcatctgaagaagaacttctccaagctgccgcagcgaaagattccggtggcggaggcaaatggaatcgcatacgtgcagccagcgctggacaccaactcctttgtcccgatcacaggagcctataacggtagcaatggcagcctggatcgctcgcacaatggcaatctgctgtgcgctccggcttcaccgtatacccgacgggcagccactgctccgggaacacccatcagctcgcccacgggcacctggaagcacaactccactggctatgctagctacgattccaactctagtttcggagacctccaggagaatctggccatgtcgccaaggtcgcccagtccggatgtacgagcacgcttggttcgacccaagtcccgggtggagaaagcccgtctcaacgtgggatggttggactcgtccctttccatcatggagcagggagttagggagtatgacactctgtgcctgcgcttcaaatacttcacgttcttcgatctgaaccccaagtacgaccaagtgaggatcaatcaactgtacgagcaagccaaatggagcattttgaacgaggaattggaacccaccgaggaggagaccctcatgtttgccgccctgcagttccaggtgaatcatcagacggatctgcatcccccaggcatcgattccggaatagatacctccagtcaggagactggcggcgaggacgacattgactccgctctcaacgagctgcagatcacactcgaaggaccaggaggtggcaaggatcagggcaacatcaccaggataccagagctgtcggactatttgaaattcctcaagcctcaaaggttcacccttaaaggatacaagcgctacttcttcacctacagggatctgcatctgcacctttacaaatcgcaggatgagtccaggcggggagctcccaccatcagcatcaatttgaagggctgcgaggtgacgcccgatgttaacctggcccaaggaaagttcgccatccgtctggaagttccgtcagagatcagaaatggtccgaacagtgaggtctgggtgagatgcgacaacgaagagcagtacgccaagtggatggcagcctgtcgtctggccgccaagggtcgctctctagccgatagctcttacgacagcgaagttagcagtattcgctcgctgctgcagatgcagaaacccgcccagggagctccgctcaccgtcaacccgcgaagtgttgagcccatggattacctatcgcccaaaatgatgcgcaaactatccagcaaggcggtgcagaggatcctagaggcccatgccaacgttcgccagctgagcttaatggacgccaagatgaagtacatccaggcttggcaatctctaccagacttcggtgttactctcttcatcatcaagttcgatggacacaagaaggaggagctgttgggcgtggccaacaatcgtatcatgcgcatggacctcaacaccggcgatcacataaagacctggcgctacaacacaatgaaggcctggaatgttaactggggcatcaagtgcatgatgattcagctgcaggacgagaacatcgtcttctccgtgcagtcggccgactgtaaggtggtgcacgagttcatcggcggctacatattcatgtccatgcgatccaaggagaacaaccagacgctgaacgaggagatgttccacaagctgacgggcggctggtcgtaa

SEQ ID NO: 135 - protein, 708 aa, Drosophila melanogaster
MIHVGENTWNLRILITDLQVEKTLRVKGDQHIGGVMLNLVDPELPKDWSDHALWWPAKNIWLTRTRSTLDQAGVQSDSFLHFTPMHKTLRVQMPDLRYLDYRVNFSAKTFGAVVSLCKDLDIRYPEELSFCKPLEPEHLKKNFSKLPQRKIPVAEANGIAYVQPALDTNSFVPITGAYNGSNGSLDRSHNGNLLCAPASPYTRRAATAPGTPISSPTGTWKHNSTGYASYDSNSSFGDLQENLAMSPRSPSPDVRARLVRPKSRVEKARLNVGWLDSSLSIMEQGVREYDTLCLRFKYFTFFDLNPKYDQVRINQLYEQAKWSILNEELEPTEEETLMFAALQFQVNHQTDLHPPGIDSGIDTSSQETGGEDDIDSALNELQITLEGPGGGKDQGNITRIPELSDYLKFLKPQRFTLKGYKRYFFTYRDLHLHLYKSQDESRRGAPTISINLKGCEVTPDVNLAQGKFAIRLEVPSEIRNGPNSEVWVRCDNEEQYAKWMAACRLAAKGRSLADSSYDSEVSSIRSLLQMQKPAQGAPLTVNPRSVEPMDYLSPKMMRKLSSKAVQRILEAHANVRQLSLMDAKMKYIQAWQSLPDFGVTLFIIKFDGHKKEELLGVANNRIMRMDLNTGDHIKTWRYNTMKAWNVNWGIKCMMIQLQDENIVFSVQSADCKVVHEFIGGYIFMSMRSKENNQTLNEEMFHKLTGGWS

SEQ ID NO: 136 - DNA, 3117 bp, Drosophila melanogaster
  CDS (1)..(3117): CT34979
atggcggaggagaatcccggagctcttgccgccaacgtgccctatttgggagtggatgagttgggcgcatcggtgattgtggagcctggtttggaaggatccaatgccggaggccggacgctaccggctgcggccattaagtttgctgatctcaccgagagcggcagtgagtcgggagacaacgaggccgaggaacctgtatccgctggcccggataatgccaacgccatcggtgagccgggcaccagtgcatccgccgcggaggagaacggaacagtagagcgcaactcgccgccgcccaattgcgccatctgcttgtcccgctgcaggaggaagtgcttcacggactcgtgcatgcaccagttctgcttcaagtgcctgtgcgagtggagcaagataaagcccgagtgtccactgtgtaagcagcccttcagaaccatcatacacaatgtccgcaccctggacgactacgatcgctacccggtgcagactacgtcgccggttccaacagaaaatccctccctacgttaccacattgtgaggcgtcccaggtacacgccgctggtgcagaaccaggccgtcattgtcaacgacatcgaggcggccatagcggcaggagctgctggtgaagatgtgctttcggcggcagaagtagcagctggcaggcgatcgtacagccgctttgagccgtatcgctcggagctgatgaattactaccagcacgatcaggatgcatccacgtcgggttcattgagccagctctggcgacgttatgtgtacgatagaaagctgtatgctctgcccgtcagcgacagcgtgactggacactttcgagagtggagcgcccgtttttacagaaacaatcctgctcagattcatcgcctgatgccttggatccatcgcgacatcatgtgcctactgaggaatgccgcacatagcgtaaatactgtgatgactctgatgagcgacctcctgcccatgactagcttactaggtcctacattccgtcgacggctgtcgccgtatctcggcgagcgcaccagtcactttatccacgaactgtttaactttgcccgctccccgtatgacataaacggttacgatcatgtggtgcagtattcggcacgagtggctgaggaggtggaggtggatctgttggacatggtggagacacaatcctcgaacggtgatgatctgaatttggaggtcggagatagcgatgcggatgctataaacgctggcttctctccggattggagcccccctagggtacgcccgtcgaccagtgtgattgtgaccaatcctggtgccacacattccttcagcgtgacaatggccagtgatggcagtgagctgccggggatttccatacgccgtacaaccaatgtgggctcacaaacggttgccattaacctgagcatgaggcgcccagcggcggttgccagcgaggaaccagaggtcatcgagatcgacgacggcgatgcggccgcaaatgcagaggtggcggccatcaatgatggcagcaacaccagtaggagacacgcaggtgctactcttccagtgacggcgcacatcgaactggagagcagcagcagttccggcgatgaggatgagtgcgtctttgtgctggagctgaagccaccacacatgcgcactcccgaacaggtgagccttgactcaaatagtgactccgatgtggtgttcgtaaatgagcagcacgaagctgcgccggacgcaattgccgaaaaccggtcgacacaatcccctttggatctggcctccagggatcagggcctgtttatggggcccagcacaagtggcgcagcggccaacagaggcaagaactggaagctggtcatggcgcagacacggcgcctcgatcagttgcgcacgctgcgctctatacgttcgaagaaatcacgccgttcatccatgcctgcccgcagtgacagtggcagcagccccagcagctgcagcagctcctcctttcacttcagcagcagcagcgatgaggatagcagtgacagtagtaccaccaactccgagccacccaagaaaaagtcacgcaagcgagtggcgaataataagcgctctaaaaaggagtcaatcgggaaaaggacatctcgtaaacggaaggccaaagaccagaatatggaaatgcttgagcagcagcagataagccaaaagaagccccagcgccaaccggaaagcagcagtgacagtccaagttcgtccgatgacgagtcaggtggcgatagcagcgagtcatccggtcaacccaacacgaacaacaacaaatccagcagcgattccgatgatgatagcgctgtaaacatgcagctcagtgccttgcgcgccacactaaaagcggaggcaactctggaggataggaaacctgtaaaactggagcttcagttgccggatgacgaccaggcggggcccctccactcacggatgactccatcgccgagagaggataacgaaccgggttgcagtgcaccgaaacggcgacgcagttgcagccacagcaatcagtccagccagagtgccagtttggccagcagttcgacagccacctcgagctcggctccattaagttcgtttgcctggggagcagcgggcttttccggcgatccgctgatgcgcggacatccggcgatggaagagcacgacatagccaactccctaatcgaactgtccactctaacgcagcctgtgaacatcggactcttcaacgagcattataattcggcagagaattccatgggcatgctgagcaacacgttgtgcgacagcccacaaactttggcggcggatgacgccaatctagagaactatttcgatacagatgcggatccggaggccagccgtgaacgggatgcctattcgctggaggccgcaatcgatgtagttggcgaatcagagttgcaaatcgccgaggatacagccactgccaccgaagaacaagatgaggaggacgaagaggatgaagatcaagaggaagacgaccaggaagaggaaaaagctgcggaggaagaagaggaagaggaggaggacgacgatgatagcgacaaccacgatgaaaacgatgagaatcagggactactgccgtattaa

SEQ ID NO: 137 - protein, 1038 aa, Drosophila melanogaster
MAEENPGALAANVPYLGVDELGASVIVEPGLEGSNAGGRTLPAAAIKFADLTESGSESGDNEAEEPVSAGPDNANAIGEPGTSASAAEENGTVERNSPPPNCAICLSRCRRKCFTDSCMHQFCFKCLCEWSKIKPECPLCKQPFRTIIHNVRTLDDYDRYPVQTTSPVPTENPSLRYHIVRRPRYTPLVQNQAVIVNDIEAAIAAGAAGEDVLSAAEVAAGRRSYSRFEPYRSELMNYYQHDQDASTSGSLSQLWRRYVYDRKLYALPVSDSVTGHFREWSARFYRNNPAQIHRLMPWIHRDIMCLLRNAAHSVNTVMTLMSDLLPMTSLLGPTFRRRLSPYLGERTSHFIHELFNFARSPYDINGYDHVVQYSARVAEEVEVDLLDMVETQSSNGDDLNLEVGDSDADAINAGFSPDWSPPRVRPSTSVIVTNPGATHSFSVTMASDGSELPGISIRRTTNVGSQTVAINLSMRRPAAVASEEPEVIEIDDGDAAANAEVAAINDGSNTSRRHAGATLPVTAHIELESSSSSGDEDECVFVLELKPPHMRTPEQVSLDSNSDSDVVFVNEQHEAAPDAIAENRSTQSPLDLASRDQGLFMGPSTSGAAANRGKNWKLVMAQTRRLDQLRTLRSIRSKKSRRSSMPARSDSGSSPSSCSSSSFHFSSSSDEDSSDSSTTNSEPPKKKSRKRVANNKRSKKESIGKRTSRKRKAKDQNMEMLEQQQISQKKPQRQPESSSDSPSSSDDESGGDSSESSGQPNTNNNKSSSDSDDDSAVNMQLSALRATLKAEATLEDRKPVKLELQLPDDDQAGPLHSRMTPSPREDNEPGCSAPKRRRSCSHSNQSSQSASLASSSTATSSSAPLSSFAWGAAGFSGDPLMRGHPAMEEHDIANSLIELSTLTQPVNIGLFNEHYNSAENSMGMLSNTLCDSPQTLAADDANLENYFDTDADPEASRERDAYSLEAAIDVVGESELQIAEDTATATEEQDEEDEEDEDQEEDDQEEEKAAEEEEEEEEDDDDSDNHDENDENQGLLPY

SEQ ID NO: 138 - DNA, 2352 bp, Drosophila melanogaster
  CDS (1)..(2352): CT3955
atggacgaggatgacaacctgtccaatgccgacataagcatagatgacgaggaggtggtgcgggagcagacccaccatccgcccatgcaagaggatcaggagctggataacgaagatgggtcatccgacgtggatctgtcttcggtgtacgtcgtgccacccatagtctcggcaccatcgcccgcatcagtgcgcatcgctggtggatccacaattggtggcggaggggtcgcagctggagcagttccaacaaccaccgataactcgcattcccccttccacgattgggattccagtgtggcggccgctgctgctccaccgccgccaccgcccaggacaggaccaactacaactacaagctccggcacagccgcggaatcgggagccgcgtccgccttatccgacgatgccggcgccaagccaagtttcttctttggcgcctcctcgttcagtttgcgcagccgcaaggaggtggccgccctgatcaacacggaatgctgccgtggcagccccacacccgatctcgactccataatggataccctattcaatccggggacgcccatcgacaatctggacaacatcgagtggatacgatggctcattgccggcggacggacgccgcaggagtttgttaaaattgtgcgcagctatgacaaccacgccaaatgcggtctggtatgggtaccgcatgtggtggcctacaggtgccgcacttgcggcatatcgccctgcatgtccatatgccgggactgcttcaagaagggcaaccacacgaaccacgacttcaatatgttcctgtcacaggcgggcggtgcctgcgattgtggtgacacctcggtcatgaaggcggagggtttttgcagtgatcatggcatcaataatcgggtgaatcgcgatccggtgccaaacaatcttttggcagtggccgaggccataatgcccaagctgctcttccgcctgctgcagcacttccgtgagcacagcgacaccccactggaggtgcaagcgataacgtcgtactcctgcgaggagttcgccaacatgctgatcgatctgaacaacatgggcgaaataatgcgcaaagtgatgacgcgcacgctgataaatccggaggtgtatgccttcttcatggaagcaccgtgccaggacacccggaatggacgcttcttgaaggcgaaccgagagaagtacgaggatgccgtcaatagattcccaaacccagagccacccgatgagtacagagatctgcccgcgctgggcgacaaattggtccacaccacgctactcgaagagttcatcttctggacatttaagttcgagtttccacagactctggtctgctttctgctgaacatgctgcctgatcaggattacaaggaacacctcacccgcacatttgtgatgcactacagccgcataccgtccgtgttggaaatgtcccgtgatccggacacgctcagcaaccgggtggtccacatgagcgtccaactcttctctaacgaaagtctggccctcaagatggtcaacgagctgtcgctgctgcacgtaatgattattagtctgaagctaatgatgtccaagatactcatacagaatacattgcatgatcccaacaagaattttcatttcgtcatcgactgcacgcgtcaggtgatgaaggaccactgctactggccactagtctcggactttaacaacgtcctttcacacgaatcggtggccctggtctttctgcgggacgacaatctcatcgatatgtggttccagtttctccagatgctccagggcatgaatgtcaatgtgcgcgagacggcttctcatgtggaattcgagccaaatagctactatgcggcgttctcctgtgagcttgaggccagtgcctatcccatgtggtcgattatctcgcatctgcaggatggcacacatgcccatctggcaaagaagatcatcaactactgtgtgacgacgctgcacgagtggctagactctatttactttatggaggcgcgtctatctatggttggtattttcaatccgtttattgcagtttcaataaaatccttttatttatccgtgcaggaggagatgatgcaggcttcgttccactttcccctgcatcgttatctggctgcctttgtttgccaggcggtaactaaaatgggaatcagtctgaacgatgtgctgccctcacgcccctatctgctgcccctgctgatgatccatccacttcgcgtccagattcacattcgtttttatttcttttgttattttcaatataatttgtttttatattcttgtcttgccggattctgcatctcctgcggttcgttctcctctgatctcacttaa

SEQ ID NO: 139 - protein, 783 aa, Drosophila melanogaster
MDEDDNLSNADISIDDEEVVREQTHHPPMQEDQELDNEDGSSDVDLSSVYVVPPIVSAPSPASVRIAGGSTIGGGGVAAGAVPTTTDNSHSPFHDWDSSVAAAAAPPPPPPRTGPTTTTSSGTAAESGAASALSDDAGAKPSFFFGASSFSLRSRKEVAALINTECCRGSPTPDLDSIMDTLFNPGTPIDNLDNIEWIRWLIAGGRTPQEFVKIVRSYDNHAKCGLVWVPHVVAYRCRTCGISPCMSICRDCFKKGNHTNHDFNMFLSQAGGACDCGDTSVMKAEGFCSDHGINNRVNRDPVPNNLLAVAEAIMPKLLFRLLQHFREHSDTPLEVQAITSYSCEEFANMLIDLNNMGEIMRKVMTRTLINPEVYAFFMEAPCQDTRNGRFLKANREKYEDAVNRFPNPEPPDEYRDLPALGDKLVHTTLLEEFIFWTFKFEFPQTLVCFLLNMLPDQDYKEHLTRTFVMHYSRIPSVLEMSRDPDTLSNRVVHMSVQLFSNESLALKMVNELSLLHVMIISLKLMMSKILIQNTLHDPNKNFHFVIDCTRQVMKDHCYWPLVSDFNNVLSHESVALVFLRDDNLIDMWFQFLQMLQGMNVNVRETASHVEFEPNSYYAAFSCELEASAYPMWSIISHLQDGTHAHLAKKIINYCVTTLHEWLDSIYFMEARLSMVGIFNPFIAVSIKSFYLSVQEEMMQASFHFPLHRYLAAFVCQAVTKMGISLNDVLPSRPYLLPLLMIHPLRVQIHIRFYFFCYFQYNLFLYSCLAGFCISCGSFSSDLT

SEQ ID NO: 140 - DNA, 708 bp, Drosophila melanogaster
  CDS (1)..(708): CT35308
atgcacgcgtgtgtctgctgctgttcgacaaacaacaattgcaacaacgagaacaacgacggcagcagcagcagcagcagtaaccacaacaacaacgacagcagcatcagcagcagcagcaaaaacaaattgcagctaaaaaagcgcagggccgaagtcgaagaagaagaagaggtactggtcaagcggacgcaggataagaacaagcatcaagaggagcaggagcaggaggagcaccaggcggtggaaaagttgtctgctggccaaagcgccagtggcggcgacaacgatctcaacggcgccgcaacgagaaggcggtggtggctgcgcgatcctccaggatcagcggaagcggcagaaggagagggaaaaggcgaaggagtggaagtgggtgtgggagcagaaggatcagcgggcacaggtccgacgacgtggtggtggtcagctccatccgttgacgttgcggtgacgatagcgccggctacgttgttgctgtcgttgcagcggcaattagcaaaggaattatctaaatcaacaacaacaactgcaacaagaacaacaacagaagccacatccttagcaataaaaagcggagcagcagcgttaatatcatcattaagtgcaagcatcgccaacatcatcgattacaagatcccaaaacaccaataccaaaaccaaatcccaatcctcgccagccacgccttttaa

SEQ ID NO: 141 - protein, 235 aa, Drosophila melanogaster
MHACVCCCSTNNNCNNENNDGSSSSSSNHNNNDSSISSSSKNKLQLKKRRAEVEEEEEVLVKRTQDKNKHQEEQEQEEHQAVEKLSAGQSASGGDNDLNGAATRRRWWLRDPPGSAEAAEGEGKGEGVEVGVGAEGSAGTGPTTWWWSAPSVDVAVTIAPATLLLSLQRQLAKELSKSTTTTATRTTTEATSLAIKSGAAALISSLSASIANIIDYKIPKHQYQNQIPILASHAF

SEQ ID NO: 142 - DNA, 1860 bp, Drosophila melanogaster
  CDS (1)..(1860): CT35676
atggcctttgtcctggctaacgagaatatatcgacggaggagttcgaggatcaaataatcaatgcagttccggagccggtcaaggtgactaagcccaaagctcaggcggaattcgttgaggttccaaaggccacgcccgctcccaaaaaagcggaagcggacaacccgaaaaccaaaccactggccctgcagaagcccactctgattcccgtggtgcatgtcagcagtcggggaacagatgatatcctcaccgtcgcgggactgaagcccgagaaaatgttcggagccctcatcatgccaaatgactatttgggggagctgtacgacgtggacaacagcggctacaattgggatcccaataacaatgtcgccccgccgaccacatactccacggcagccggaggatacaccataaccgccgcccgtcttgcggagctcaggagcaactttatgtactggtacttcgacaaggacatgtacggaggacgtggcgactaccagttcgacatccatgcctccatgacgcagctgcacaagaatctgaacttccagctgcccttctacggcttccgattcaactacaccaggctttccctcaacggctacttggagttctcggatccgccagagtacctaacttaccccctggtctttccgatcaaggactggcccgccaaacgcgatccctccttcatgggcatcttcttcagcaagtgccgtgtaggacgaatttatccatcggatattgaccagcggacgcccggtgtttacttccgagtggaacgtgatctgatgggacgtacggaccgattcggcgtggaggtgcgggaacgcaccatgtgggacatccgtcagggagtcgtgggcgccgataccttcatccccaagcacgtggtgatcgccacctggaagaacgtctccttcgccggtggcatcgacaactccctctacacgacaaacaccttccaaatggtcctggccactgacgaggtctacacctatattattttcaactatgccgttctgaactggctttctcatactgaggccggaggtgatacgacgaagggcgagggtggtgttcctgcatatgtcggattcaatgccggtaatggaacccaggcgtacgagtacaatccctacagtcagaacatggtgattcgcgacctggccaacagaggttgggccaacggattcccgggtcgccacattttccgcgtggacgagcagattctaattggctcctgcaacaaggatatcgatgctgctctgctacctcttacctttgcccccgagtctggtaatatgctgggtggtcaagtcgtcaatatcactggaccctgctttgatccggccatcagggtgacgtgccacttcgatacggagtccgtgctgggaacctatgtggatcggaaccgcgtaatctgtgtgcagccctacctgaaggccgagggctatatccgattccagatctccgtgggaacccagaggttcaagtggcgcggaaagtacttcgtggagaccccggctgccgccaccgagaagatcttcttcaccaccgatgatgtgcacaagaagaaccccgccgagatccgcatcacctggaaccagtacaatttgacctcgaacgccaatgccaacgtgatgatctcgctgtggggctaccgggagaccaagatcgagccgcaactggagtacatcgatgtgatcgaggcctcctactcgaatagcggcagctacgttatcacgccctcgaactacatcaaccgcaacaacatcaaccgggacatgcagttcggattcctccagatcaatctcactcagcccgatcaatactcaggattggccatcagtccgtaa

SEQ ID NO: 143 - protein, 619 aa, Drosophila melanogaster
MAFVLANENISTEEFEDQIINAVPEPVKVTKPKAQAEFVEVPKATPAPKKAEADNPKTKPLALQKPTLIPVVHVSSRGTDDILTVAGLKPEKMFGALIMPNDYLGELYDVDNSGYNWDPNNNVAPPTTYSTAAGGYTITAARLAELRSNFMYWYFDKDMYGGRGDYQFDIHASMTQLHKNLNFQLPFYGFRFNYTRLSLNGYLEFSDPPEYLTYPLVFPIKDWPAKRDPSFMGIFFSKCRVGRIYPSDIDQRTPGVYFRVERDLMGRTDRFGVEVRERTMWDIRQGVVGADTFIPKHVVIATWKNVSFAGGIDNSLYTTNTFQMVLATDEVYTYIIFNYAVLNWLSHTEAGGDTTKGEGGVPAYVGFNAGNGTQAYEYNPYSQNMVIRDLANRGWANGFPGRHIFRVDEQILIGSCNKDIDAALLPLTFAPESGNMLGGQVVNITGPCFDPAIRVTCHFDTESVLGTYVDRNRVICVQPYLKAEGYIRFQISVGTQRFKWRGKYFVETPAAATEKIFFTTDDVHKKNPAEIRITWNQYNLTSNANANVMISLWGYRETKIEPQLEYIDVIEASYSNSGSYVITPSNYINRNNINRDMQFGFLQINLTQPDQYSGLAISP

SEQ ID NO: 144 - DNA, 1794 bp, Drosophila melanogaster
  CDS (1)..(1794): CT30180
atggccttgaaagtgctggtgggccaaaagctgatgaacgaggtggtgaagtacaagcctccaccacccaaaaagcagggcgttacgtccgctgcgggggcgggcggcatggaatggcgggtgctggtggtggacaagctgggtatgcgcatggtgtccgcctgcaccaagatgcacgaaatcagcgccgagggcatcaccctggttgaggacatcaacaagaagcgcgagccgctgcccacgatggacgcgatctatctgattacgccgtcggatgagtcagtgcgcggtctgatacgagacttcgagaacccagcgcggcccatgtatcgctatgcccatgtcttcttcaccgaagtttgtcccgaggagctattcaacgatctgtgcaagtcgtgcgcggccggaaagatcaagacgctgaaggagatcaacattgcatttttgccatacgaatgccaggtgttctcgctggactcgccggacacattccaatgcctctactcgccggcctttgcctccattcggagcaagcacatcgagcgaattgccgagcaaatagccacactgtgcgctacccttggggagtacccaaatgtgcgctaccgcagcgactgggacaggaacatcgatttggccgcgtcggtgcagcagaagctggacgcctacaaggccgacgatgccaccatgggcgagggccccgagaaggcacgatcccagctgctaatcctggatcgcggcttcgactgcgtgtcgccgctgctgcacgagctcaccctgcaggccatggcctacgatttgctacccatcgtcaatgacgtgtatcgctacacgcccggccccaaccagccggataaggaggtgctgctcgacgagaacgacgacttgtgggtggagctgcgtcacgagcatatcgctgtggtctccacccaggtgactcagaacctcaagaaattcaccgactctaagcgcatgggctcggctgacaagtcgtcgatgcgcgatctctcgcagatgatcaagaagatgccgcagtaccagaaggagctgtccaagtactccacccacttgcatttggccgaggactgcatgaagtcgtaccagaactacgtggacaagctgtgccgcgtggaacaggatctggccatgggcacggacgccgagggcgaaaagatcaaggatcatatgcgcaacattgtgcccatcttgctggacgccaatgtctcgaactacgacaaggttcgcatcattgccctgtacgtcatgatcaagaacggaatttccgaggagaacctgaccaagctgtttacgcatgcccagctgtcgccgaaggatcaggatatggtgcgtaaccttagttgcttgggcatcaatgtcattgcagattcgcgcaagaagcagtactcggtgccgcgcaaggagcgcaccacagaaagcacctaccagatgtcccgctggacaccggtgatcaaggacatcatggaggattgcatagaggataagctcgatctccgccacttccccttcctcgagggcagggcccaaaataccaattatcatgccccaacactggcacgctacggtcactggcacaaggacaagggacaggcgcaggtaaagaacgtgcccaggctcattgtcttcatcgtgggcggcgtgagtatgtccgagatgcggtgcgcctacgaggtgaccaatgcggttcgcaattgggaggtccttgttggctcttcgcacatcctgtcgcccgaaatcttcctcagcgatttgggcagtctctcgaaggaggactaa

SEQ ID NO: 145 - protein, 597 aa, Drosophila melanogaster
MALKVLVGQKLMNEVVKYKPPPPKKQGVTSAAGAGGMEWRVLVVDKLGMRMVSACTKMHEISAEGITLVEDINKKREPLPTMDAIYLITPSDESVRGLIRDFENPARPMYRYAHVFFTEVCPEELFNDLCKSCAAGKIKTLKEINIAFLPYECQVFSLDSPDTFQCLYSPAFASIRSKHIERIAEQIATLCATLGEYPNVRYRSDWDRNIDLAASVQQKLDAYKADDATMGEGPEKARSQLLILDRGFDCVSPLLHELTLQAMAYDLLPIVNDVYRYTPGPNQPDKEVLLDENDDLWVELRHEHIAVVSTQVTQNLKKFTDSKRMGSADKSSMRDLSQMIKKMPQYQKELSKYSTHLHLAEDCMKSYQNYVDKLCRVEQDLAMGTDAEGEKIKDHMRNIVPILLDANVSNYDKVRIIALYVMIKNGISEENLTKLFTHAQLSPKDQDMVRNLSCLGINVIADSRKKQYSVPRKERTTESTYQMSRWTPVIKDIMEDCIEDKLDLRHFPFLEGRAQNTNYHAPTLARYGHWHKDKGQAQVKNVPRLIVFIVGGVSMSEMRCAYEVTNAVRNWEVLVGSSHILSPEIFLSDLGSLSKED

SEQ ID NO: 146 - DNA, 1635 bp, Drosophila melanogaster
  CDS (1)..(1635): CT34113
atgtataatttacgcctgctacgaaatctcctgccgatcgccgggcacgcccatccgcgctggctggctagccagcacaagcggcgcccgcagccgggcagcctgccggccgatcggctggaccagctgcgcagtgatctcttcgagcgtcgccatgagctgagtggcgcggagtggacggaggtgcggaggtcgctcgtggacgggtacaagcacatcaacgggcacaacgtggacgccgtcattctgggcgtgtgcagtgcacccaaccaattgtcgttggccaaaagctatgtggagttcctgaggagcaggggctccaaaccgaatgcagcgacactgggtcgcctgctgagggtctacaatgccgcctaccacgagcgaccgcttagcgaggcggaacagtcggagatactgcagatctgccgatcattgcaggcggagcacgaaactctggacgccagcagctgcgagaatgtgattcatggactggtggccaccagcggcgatgattggcagcgcggactgccgctgctcgagatgatgaaggtcaccagtacgcccagtgtggccgcctactccgcgctggcggagaaggccttcagtgtggcgacaccggagcaggaattggcctggcgcctactggaagagatggccacggcacggaagccgcccaaatgcgaggtctatctggcgctgctcaatcgactggccaacgaaacggcacaacttcctgcacagcttagccttttgttgcaattcctcgaacgccatgagattctagtcagccagcgggtggcgatacgattgcaggagctgtccagccaggtgccccaactgttgcacaccaggaccacccatttgggaggtctgggcaagtgccagtcctgccagcagcacctccagccggtggccatcagcgatgaggagttccggcagctaagcgaatgttttctggagcgcgtgctcatacgacgagacgtcttccagcgctccacgcccgaggaggtggccaggttcaagaagtttgtcgaaaagacggcgccatacgactgtgtgatcgatggcctcaatgtggcctactctacgggcaccaaaaagacgccgcagcagctggccaagctagtggctacggtggtgcgtcatttccgggaacaggacaagcgtgtcctcgtcctgggacgcgagcacatgcgcaactggtccaagcaggccatgcactatgtgcactgcaatgccagcctcttcttgaccagcaatctgtcgcacgatgatcccttcctgctgtatgccacgctgcgcagcggccaggagacagacttcttctcccgcgacctgatgcgcagtcacgcctttcatctgggcaccgagctgaagcccatctttcgtcgctggcagcaggagcaccagttctccctggtcacccaaacgcaaacgggtcagattatagtcaaggagcccgttcgtcatcggctgtgtgcccaccaagtggcggacacctggcatgtgccctactgcgcgcagtacacgccgcatcccacagacagcttcgaggtgcccgccaactggctgtgcatccagatgaaggagcagacgatacccgccaccaaaaccaagaccaaaacaacgaggtaa

SEQ ID NO: 147 - protein, 544 aa, Drosophila melanogaster
MYNLRLLRNLLPIAGHAHPRWLASQHKRRPQPGSLPADRLDQLRSDLFERRHELSGAEWTEVRRSLVDGYKHINGHNVDAVILGVCSAPNQLSLAKSYVEFLRSRGSKPNAATLGRLLRVYNAAYHERPLSEAEQSEILQICRSLQAEHETLDASSCENVIHGLVATSGDDWQRGLPLLEMMKVTSTPSVAAYSALAEKAFSVATPEQELAWRLLEEMATARKPPKCEVYLALLNRLANETAQLPAQLSLLLQFLERHEILVSQRVAIRLQELSSQVPQLLHTRTTHLGGLGKCQSCQQHLQPVAISDEEFRQLSECFLERVLIRRDVFQRSTPEEVARFKKFVEKTAPYDCVIDGLNVAYSTGTKKTPQQLAKLVATVVRHFREQDKRVLVLGREHMRNWSKQAMHYVHCNASLFLTSNLSHDDPFLLYATLRSGQETDFFSRDLMRSHAFHLGTELKPIFRRWQQEHQFSLVTQTQTGQIIVKEPVRHRLCAHQVADTWHVPYCAQYTPHPTDSFEVPANWLCIQMKEQTIPATKTKTKTTR

SEQ ID NO: 148 - DNA, 189 bp, Drosophila melanogaster
  CDS (1)..(189): CT34115
atggacatattgaatgagttcagcaatgtattctggagtacgcacatttggctgccgccgaacacaacctgggcggacattgcgcccggctcgcgtccagatgtggtgcacgccaactacaaggacctcatatggcccattccattcgccgctgttgtcatgctggtccgctacacgctggagcggtaa

SEQ ID NO: 149 - protein, 62 aa, Drosophila melanogaster
MDILNEFSNVFWSTHIWLPPNTTWADIAPGSRPDVVHANYKDLIWPIPFAAVVMLVRYTLER

SEQ ID NO: 150 - DNA, 900 bp, Drosophila melanogaster
  CDS (1)..(900): CT4708
atgggcaaggatttcgatgctgttggattcgtcaaggatttcgctgccggaggcatctccgcagctgtctccaagactgccgtcgcccccattgagcgtgtgaaactgctcctgcaggttcagcacatctcgaaacaaatcagccccgacaagcagtacaagggcatggttgattgctttatccgcattccaaaggagcagggattctcgtccttctggcgcggcaacttggccaacgtcatcagatacttcccaacccaggctctgaactttgccttcaaggacaagtacaagcaggtcttcctgggtggcgtggacaagaacacccagttctggcgctacttcgccggcaacttggcctccggtggtgccgctggtgctacctctctgtgctttgtctaccccttggactttgcccgtactcgcttggctgctgatactggcaagggtggtcagcgtgaattcaccggtctgggcaactgcttgaccaagatcttcaagagcgacggcatcgttggattgtaccgtggtttcggagtgtccgtgcagggcatcatcatctaccgtgccgcctacttcggcttctacgataccgctcgcggtatgctgcccgaccccaagaacacacccatctacatcagctgggccatcgcccaggttgtgacaaccgtcgctggcatcgtgtcctatcccttcgataccgtgcgtcgtcgcatgatgatgcagtctggtcgcaaggccaccgaggtcatctacaagaacacactgcactgctgggccaccatcgccaagcaggaaggcaccggtgccttcttcaagggcgccttctccaacattctcagaggaactggtggcgctttcgtgcttgtgttgtacgatgagatcaagaaggtcttgtaa

SEQ ID NO: 151 - protein, 299 aa, Drosophila melanogaster
MGKDFDAVGFVKDFAAGGISAAVSKTAVAPIERVKLLLQVQHISKQISPDKQYKGMVDCFIRIPKEQGFSSFWRGNLANVIRYFPTQALNFAFKDKYKQVFLGGVDKNTQFWRYFAGNLASGGAAGATSLCFVYPLDFARTRLAADTGKGGQREFTGLGNCLTKIFKSDGIVGLYRGFGVSVQGIIIYRAAYFGFYDTARGMLPDPKNTPIYISWAIAQVVTTVAGIVSYPFDTVRRRMMMQSGRKATEVIYKNTLHCWATIAKQEGTGAFFKGAFSNILRGTGGAFVLVLYDEIKKVL

SEQ ID NO: 152 - DNA, 1683 bp, Drosophila melanogaster
  CDS (1)..(1683): CT37506
atggccacccgtggggccggctcgactgtggtccacacgacggtgacagcgctgacggtggagacgatcaccaatgtcctgaccacggtgacttcgttccattcgaacagcgtcaacatttcgaacaacaacagcagcagtggagcggccccgggggcggatgcagctggcggcgatgcagggggcgtggcagcggctcaggcggacgccaacaagcctatctatcctcggctctttaaccgcatcgtgctgacgctggagaacagcctcattccggagggcaaaatcgatgtgacgccatccagccaggatggactggaccatgagacggagaaggacctgcgcatactgggctgcgagcttattcagacagccggaattttgctgcgcttgccgcaggttgccatggccaccggccaggtgctgttccagcgcttcttctactcgaagagctttgtgcggcacaacatggagactgtggccatgagctgcgtgtgcctggcgtccaagatcgaggaggcgccgcgccgcattagagacgtgatcaatgtgttccatcacatcaagcaagtgcgggcccaaaaggaaatctcgcccatggtgctagatccttactacacgaacctcaagatgcaggtgatcaaggccgagcggcgcgtcctcaaggaactgggcttctgtgtacacgtgaagcatccgcacaagctgatcgtgatgtatctgcaggtgcttcagtacgagaagcacgagaagctgatgcagctctcctggaacttcatgaatgactcgctgaggacggacgtttttatgcgctacacaccagaggcgattgcatgcgcctgcatctacctgagtgcccgcaagctcaacatacctctgcccaacagcccgccgtggttcggcatttttcgggtgcccatggcggacattacggatatctgctaccgtgtgatggagctgtacatgcgttccaagccggtggtggagaaactggaggcggccgtggacgagctgaaaaagcggtacattgatgcgcgcaacaaaacgaaggaggcaaacacaccgccggctgtaatcaccgtggatcggaacaatggctcgcacaatgcgtggggtggcttcatccagcgtgctatcccactgcccttgccatcggaaaagtcgccgcaaaaggattcgaggtcacgctcgcgatccaggacgcgcacccattcgcggacacctcgctcccgatcacccaggtccaggtcgcctagtcgcgagcgcactaagaagacccaccgcagtcgatcctcccgctcgcgctcccgttcgccgccgaagcataagaaaaagtcacgtcactactcgaggtcgcccacgcgctccaattcgccgcacagcaagcacaggaagtcgaaatcctcgcgagaacgctctgaatactactccaagaaagatcggtctggaaacccaggcagtagcaataatctaggtgatggcgacaagtatcgcaactccgtctccaattccggcaagcacagtcggtactcctcctcctcgtcgcgtcggaacagcggtggtggtggagacggaagaagcggaggaggaggtggtggcggcggtggaggcaacgggaaccacggcagccgaggggggcacaagcatcgggatggcgatcgctccagggatcgcaagcgctaa

SEQ ID NO: 153 - protein, 560 aa, Drosophila melanogaster
MATRGAGSTVVHTTVTALTVETITNVLTTVTSFHSNSVNISNNNSSSGAAPGADAAGGDAGGVAAAQADANKPIYPRLFNRIVLTLENSLIPEGKIDVTPSSQDGLDHETEKDLRILGCELIQTAGILLRLPQVAMATGQVLFQRFFYSKSFVRHNMETVAMSCVCLASKIEEAPRRIRDVINVFHHIKQVRAQKEISPMVLDPYYTNLKMQVIKAERRVLKELGFCVHVKHPHKLIVMYLQVLQYEKHEKLMQLSWNFMNDSLRTDVFMRYTPEAIACACIYLSARKLNIPLPNSPPWFGIFRVPMADITDICYRVMELYMRSKPVVEKLEAAVDELKKRYIDARNKTKEANTPPAVITVDRNNGSHNAWGGFIQRAIPLPLPSEKSPQKDSRSRSRSRTRTHSRTPRSRSPRSRSPSRERTKKTHRSRSSRSRSRSPPKHKKKSRHYSRSPTRSNSPHSKHRKSKSSRERSEYYSKKDRSGNPGSSNNLGDGDKYRNSVSNSGKHSRYSSSSSRRNSGGGGDGRSGGGGGGGGGGNGNHGSRGGHKHRDGDRSRDRKR

SEQ ID NO: 154 - DNA, 1242 bp, Drosophila melanogaster
  CDS (1)..(1242): CT35131
atgccgtacaacatggacgtactgataccggaaaaggacgagctctccgacttgaagctaaaagatgcgcacagttccctggacgaactggacatggaggatctctacgtgcgttacaagaaactgcaaaagacactggagttcattgaagtgcaggaggagtacatcaaggacgagcagcgaaacctgaaaaaggagtatctgcacgcccaggaggaggtgaagcgcatccagtcggtgccgctggtgattggccagttcctggaggccgtcgatcagaacacgggcattgtgggctccaccaccggctccaattactatgtgcgcatcctgtccaccatcgatcgcgagctgctgaagccctccgcctcggtggccctgcacaagcacagcaacgcgctggtggacgtgctgccaccagaggcggatagctccatttcgatgctgcagccggatgagaagcccgacgttagctatgcggacattggtggcatggacatgcagaagcaggagatccgcgaggcagtcgaactgccgctgacccacttcgagctgtacaagcagattggcatcgatccgccgcgcggcgtgcttatgtacggtccgcccggttgcggcaagaccatgttggccaaggcggtggcccatcatacgacggcgtcgttcatacgcgtcgtcggctcggagttcgtgcagaagtacctcggcgagggaccgcgcatggtgcgcgacgttttcaggctggccaaggagaacgcgccggccatcatcttcattgacgagatcgatgcgattgccacgaagcgtttcgatgcgcagactggcgccgatcgcgaggtgcagcgcattctgctcgagctgctcaaccagatggacgggttcgatcagaccacgaacgttaaggtgatcatggctaccaacagggcggacacactcgatccggcattgctgcgacctggtcgattggatcgtaagattgagttcccgctgcccgatcgccggcagaagcgactcgtcttctccaccatcacctcgaagatgaacctaagcgaggatgtcgatttggaggagtttgtggcgcggccggacaagatctccggtgccgatatcaacgccatttgccaagaggcgggcatgcacgcggtgcgtgagaatcgctacatcgttttggccaaggacttcgagaagggctacaagaacaatatcaagaaggacgagcaggagcacgagttctacaaatag

SEQ ID NO: 155 - protein, 413 aa, Drosophila melanogaster
MPYNMDVLIPEKDELSDLKLKDAHSSLDELDMEDLYVRYKKLQKTLEFIEVQEEYIKDEQRNLKKEYLHAQEEVKRIQSVPLVIGQFLEAVDQNTGIVGSTTGSNYYVRILSTIDRELLKPSASVALHKHSNALVDVLPPEADSSISMLQPDEKPDVSYADIGGMDMQKQEIREAVELPLTHFELYKQIGIDPPRGVLMYGPPGCGKTMLAKAVAHHTTASFIRVVGSEFVQKYLGEGPRMVRDVFRLAKENAPAIIFIDEIDAIATKRFDAQTGADREVQRILLELLNQMDGFDQTTNVKVIMATNRADTLDPALLRPGRLDRKIEFPLPDRRQKRLVFSTITSKMNLSEDVDLEEFVARPDKISGADINAICQEAGMHAVRENRYIVLAKDFEKGYKNNIKKDEQEHEFYK

SEQ ID NO: 156 - DNA, 732 bp, Drosophila melanogaster
  CDS (1)..(732): CT4802
atgatttcgctgctgcaaatgaaattccgtgcgcttttgttgttgctatcaaaagtatggacatgcatttgtttcatgttcaatcgccaagtgcgagcttttatccagtatcaaccggttaaatacgaactcttcccgttgtcacccgtctcgcggcaccgcctgagcctggtgcagcgcaagaccctcgttctggacctggacgaaacgctaatccactcccatcacaatgcgatgccccggaatacggtgaagccgggcacgccgcacgatttcactgtcaaagtgaccatcgatcggaatccagtgcgctttttcgtgcacaagcgaccgcatgtggactacttcctggacgtggtctcgcagtggtacgatctggtggtcttcacggccagcatggagatttacggagcggcggtggcagacaagctggacaacggacgaaacatcctccggaggcgatactacagacagcactgcacgcccgactacggatcctacaccaaagacctgtcggccatctgcagtgacctaaataggatatttatcatcgacaattcgcccggcgcctatcgctgttttcccaacaacgccatacccatcaagagttggttctcggacccgatggacacggcgctgctgtcgctgctgcccatgctggatgcgctgaggttcacgaacgacgtgagatcggtgctgtcgaggaacttgcacctgcaccgcctctggtaa

SEQ ID NO: 157 - protein, 243 aa, Drosophila melanogaster
MISLLQMKFRALLLLLSKVWTCICFMFNRQVRAFIQYQPVKYELFPLSPVSRHRLSLVQRKTLVLDLDETLIHSHHNAMPRNTVKPGTPHDFTVKVTIDRNPVRFFVHKRPHVDYFLDVVSQWYDLVVFTASMEIYGAAVADKLDNGRNILRRRYYRQHCTPDYGSYTKDLSAICSDLNRIFIIDNSPGAYRCFPNNAIPIKSWFSDPMDTALLSLLPMLDALRFTNDVRSVLSRNLHLHRLW

SEQ ID NO: 158 - DNA, 1254 bp, Drosophila melanogaster
  CDS (1)..(1254): CT43084
atgcccgtgaaaacagtgaatcgccagcagagccaaacgcccgcccaacaactgcaattgcagcagcagcgggacgtcgagaatgggctctatcccacgattccggccgagcgacgatcgcccccctcgcgtccgcaaacgctgcgacaggacaccatcgatatggaggaaataccgctcaatcagacgaacagccaggagccagaggatcggcgcaaaatgcacgagatatttgacaagcacgactctgacagagatgggctgatcaacacgcacgagctgaaggaactgatctcggatggctattgccgggacattcccgcctacatcgccgaccagatcctgaagcgcagcgatcaggataacgacggccacctggacttcgaggaattctatgcgatgtccctgcgccacaagtggatggtgcgcaacatgctgacccgctactgtcgctacgttgtgccgccaccgaagcccttagagggcgatgagcccgacggtgcctacgagaagcaaatgtccatctgcccgccgccgctcaccatggtgctcttctcgattatcgagataatcatgttcctcgtggacgtcatacatttccaggacgatcccaactaccaggatcgcataggcgagagcacaagtggaccagcggccaccctgttcatctacaatccgtacaagcgctatgagggatggcgctttgttagctacatgttcgttcacgtgggcatcatgcatctgatgatgaacctgattatccagatctttctgggcatcgccctggagctggtgcatcactggtggcgcgtgggtctggtctacctggctggcgtgttagccggttccatgggcacctcgctaaccagtcctcgcatctttctagcgggcgcatcgggtggagtatacgcactgatcacagcccacattgccacgataattatgaactactcggaaatggagtacgccattgtccagctgctggcctttctggtcttctgcttcaccgacttgggtacctcggtgtaccgccacttgaccgaccagcacgatcagattggctatgtggcgcatttgtccggtgccgtcgccggtttgctggtggggatcggtgtgctgcgcaatttggaggtgcggcgatgggagcgcattctctggtgggtcgccgtcatcgtttactttgccctcatgaccactggcatcatcatacacgtgtttgttcccgactacttcccaaaacaggagtacaactag

SEQ ID NO: 159 - protein, 417 aa, Drosophila melanogaster
MPVKTVNRQQSQTPAQQLQLQQQRDVENGLYPTIPAERRSPPSRPQTLRQDTIDMEEIPLNQTNSQEPEDRRKMHEIFDKHDSDRDGLINTHELKELISDGYCRDIPAYIADQILKRSDQDNDGHLDFEEFYAMSLRHKWMVRNMLTRYCRYVVPPPKPLEGDEPDGAYEKQMSICPPPLTMVLFSIIEIIMFLVDVIHFQDDPNYQDRIGESTSGPAATLFIYNPYKRYEGWRFVSYMFVHVGIMHLMMNLIIQIFLGIALELVHHWWRVGLVYLAGVLAGSMGTSLTSPRIFLAGASGGVYALITAHIATIIMNYSEMEYAIVQLLAFLVFCFTDLGTSVYRHLTDQHDQIGYVAHLSGAVAGLLVGIGVLRNLEVRRWERILWWVAVIVYFALMTTGIIIHVFVPDYFPKQEYN

SEQ ID NO: 160 - DNA, 1956 bp, Drosophila melanogaster
  CDS (1)..(1956): CT4810
atggaaaccacaatcaataacaacaacaatgacaacggatatatgaaccaggcgtatgtgggttcattgaatgcctcaactatctcaataccaggggcatacaagcccaatgagtcatccaatggcaagaagacgctctctgaaggatcaggctcagctccaccaccaggacatggagatagcccgtctggagtggaggctggtcagccgggtaaaaagcgagatagttggaacaacgacatcgagttcctcatgtcctgcatcgcactgagcgtgggtctgggcaatgtgtggaggtttccctttaccgcactggagaacggaggaggagcgttcgtgataccctacctgatcgtcctgattctagtgggcaagcccgtgtactacttggaaatgctgctcggccagttctcgagtcgcggcagtgtgaaggtctacgacttttcacccatcatgagaggcattggatatggacaagtcctggccacgggcatcgttaccacctactacgccacgttaatggcgctcaccctacgctacttcgtggactccttctacccgaccttgccgtggagctactgccgcgaggagtggggtacagaatgcctggactcgggaccgcaggaggccagcagagccaccagtttggcaggaggatgcggtactcattcatttccccacaggaacatcattctgcgcgagaaggcgagcatcgatgatggcatcggatatcccagctggagcctggcgctggcactggctgtggcctggatcgtcatcgcggggattatgttcaagggtgtgaagagttcgggcaaggcctcctacttcctcgccctctttccctacgtggtgatgctggtgctcctggtgcgggcactcaccttgccgggcgccttcgacggcgtgctgtacttcctgcggccgcaatggcacaagctcctggaaccgcaggtctggtacgccgccgtcacccaggtgttcttctcactggccatctgcttcgggaacatcatcatgtacgcctcgtacaaccgcttcggccacaacatttacagggatgccaatatcgtgaccacgctggacaccttcacctccctactgtccggtgtgattatcttcgggattctgggcaacctggcgtacgagaacaacaccaccgacatcgctagtgtggtcaatggaggtccgggcctggctttcatatcttacccggacgccattgccaagtttaagtggctgccgcagctattctccgtgctgttcttcctcatgctcttcgtcctgggcatcggcagcaatgtgggcatggcctcctgcatgtccaccgtgatcaaggatcagttcggacacctgaagaactggactgtggtggttggtatagccattgtaggctactttctgggccttctgtacatcacacccggtggccagttcctgctcaacctggtcgactactttggcgtcacgttcgtggccctggtgctggccatcttcgagctggtgaccattgcctggatctacggtgtgaagcgactctgccgtgacgtggagttcatgattggcatcaagacttcgctgtactatcgcatctgctgggcggtcgtcactcctctgctaatgctcaccattctcatctacaccttggttctgtacgagcccctcaagtacaaggattacacctaccaatcgggtgtttacgttttcggttggtgcctcagtgcctttggcgtgggtcaggtgctcttctgggccattcccgccgtgcggaagcagccctcgcacttgggtctctgggcccgcatccgcaaagcctttgagccactgcccaactggggacccagcgacccgcagaccctcaagcggtaccaactgttcgttcaggagggcaacgccaacgccctcttccggcgcagcagtatctggcacaaaatctatgacaatatcttcggttaa

SEQ ID NO: 161 - protein, 651 aa, Drosophila melanogaster
METTINNNNNDNGYMNQAYVGSLNASTISIPGAYKPNESSNGKKTLSEGSGSAPPPGHGDSPSGVEAGQPGKKRDSWNNDIEFLMSCIALSVGLGNVWRFPFTALENGGGAFVIPYLIVLILVGKPVYYLEMLLGQFSSRGSVKVYDFSPIMRGIGYGQVLATGIVTTYYATLMALTLRYFVDSFYPTLPWSYCREEWGTECLDSGPQEASRATSLAGGCGTHSFPHRNIILREKASIDDGIGYPSWSLALALAVAWIVIAGIMFKGVKSSGKASYFLALFPYVVMLVLLVRALTLPGAFDGVLYFLRPQWHKLLEPQVWYAAVTQVFFSLAICFGNIIMYASYNRFGHNIYRDANIVTTLDTFTSLLSGVIIFGILGNLAYENNTTDIASVVNGGPGLAFISYPDAIAKFKWLPQLFSVLFFLMLFVLGIGSNVGMASCMSTVIKDQFGHLKNWTVVVGIAIVGYFLGLLYITPGGQFLLNLVDYFGVTFVALVLAIFELVTIAWIYGVKRLCRDVEFMIGIKTSLYYRICWAVVTPLLMLTILIYTLVLYEPLKYKDYTYQSGVYVFGWCLSAFGVGQVLFWAIPAVRKQPSHLGLWARIRKAFEPLPNWGPSDPQTLKRYQLFVQEGNANALFRRSSIWHKIYDNIFG

SEQ ID NO: 162 - DNA, 2706 bp, Drosophila melanogaster
  CDS (1)..(2703): CT4826
atgtccaaggccaagggtaagaagaaggagcgctttgatgacgacgaggagcagctggagaaagtgcaggagaagaagccaccgacaagcaagaagggtggtaagaagggaaagcgaggaggtggcggcggcgactccagcgacgaggatgtcacgaccaggaatcgggacaacgaggatctggagagcatagcctcatcgaatcagagcaaacagcagactgccggcaaaaagcaggccaagaagggtaaaaagggcaagaggaataatgactggagcgacgaggatgagaagccagagaagagtttgcctgccaacgacttggacgatgaagatgacgacgaggcgcctctggcatccaagccagctgctaaaaagccacagcccagcaaaaagaacaagaagaacaagaagaagaacgacgatttctcggacgaagataaaccggagctggacttggacgacctggacaatgaggaggatgaggtggaagtggttgctgtcaagccagcctccaagaagtccaagaagaagcagcaggctcagcaaaagaacatgttcgccatgagcgatgatgaggaggatgaggttgccgatgatctgccaaatgacagcgaagaggaggagaaggaacagctgtccaacaaggcggccaaggagtcaaaaaaggaacagcagaagcagcccgaaaaggaagtggaggagcagaaagtggagcaagtccttagcgaaaaagtggcggcagtaagtctcaaggaaaagacacctgagccggtacccaaggccgagcccgaacccgagtctgaaccccaacccgacgaggaagccgatgctgaggtagattccaagttcgaggagagcaaggaagccaaggagaagaaactcactcacaaggagaaaaagaagcaaaagaagcagcaggagtacgaacgccaaatggagctgatgacaaagaagggtggtgccggtcactcggacttggacaacaatttcaccatgtcgcaggtgcagaagagcgctggtcaaaaggcggctctggagcaagccgtggatatcaagatcgagaatttcaccatctcagccaagggtaacgatctatttgtgaacgccaacctattgattgcacatggacgccgttatggtttggtgggtcccaacgggcacggcaagaccaccctgctccggcatattgccacccgtgcctttgccataccgcccaatatcgatgtgctgctttgcgaacaggaagtcgtagctaccgataaaacggccatcaatacaatcttggaagctgatgtgcgtcgcacagagatgctaaagaaggccgatgaactggagaaacagtttgtcgctggcgatttgacggtgcaggaggagctaaacgataccttcgcggaactgaaagccattggagcctactcggcggaagccagggcacgaagaatccttgccggtttgggtttcagcaaagagatgcaggacaggccgacgaacaaattctccggaggctggcgcatgagagtgtccctagcaagagctctctatctggagcccacgttgcttatgctcgacgaaccgaccaatcatttggatcttaatgctgtcatttggctggacaactatctgcagggctggaagaagaccctgttgatcgtgtcccacgaccagagtttcttggacaacgtctgcaacgagatcatacatttggatcaaaagaaactgcaatactacaagggcaactattccatgttcaagaagatgtatgtgcagaaacgccgcgagatgatcaaggagtacgagaagcaggagaagcgcctgcgcgagctgaaggcccacggtcagtcgaagaaggcagcggaaaagaagcagaaggaatcgctcacacgcaagcaggagaagaacaagtctaagcagcagaaacaggacgaggatgagggacctcaggagctgttggccaggcccaaggaatatattgtcaagttccgcttcccggagccatcgcagctccagccacccattctgggtgtccacaatgtcaccttcgcctttccgagccagaaaccgctgttcatcaaggttgactttggcattgatctaactagtcgagtggccatcgtgggacccaatggtgtgggcaaatcaaccttcctcaagctgctgctcggtgaattggaaccgcaggagggtgagcagcgcaagaatcaccgacttcatgtgggccgcttcgatcagcactcaggtgaacatctcacggcagaggaatcggctgcagagtacctgcagcgtctgttcaatctgccccacgaaaaggcgcgtaaggcattgggttcctttggtttggtcagtcatgcacacaccatcaagatgaaggatctgtccggtggtcagaaagcccgtgtggccctcgctgagctatgcttgagtgcgccggatgtactaattctcgatgagcctacgaacaatctggacatcgagagtatcgacgccttggcggaggcaatcaacgagtacgagggtggcgtgatcatcgtctcccacgacgagcgtttgatccgtgaaacaggttgcactctctacgtaattgaggatcagacgatcaacgagattgttggagagttcgatgactacagaaaggaggttctcgattcgctcggcgaggtggtcaacaatcctagcgtggtggccaatgcggctgtgctgcaataa

SEQ ID NO: 163 - protein, 901 aa, Drosophila melanogaster
MSKAKGKKKERFDDDEEQLEKVQEKKPPTSKKGGKKGKRGGGGGDSSDEDVTTRNRDNEDLESIASSNQSKQQTAGKKQAKKGKKGKRNNDWSDEDEKPEKSLPANDLDDEDDDEAPLASKPAAKKPQPSKKNKKNKKKNDDFSDEDKPELDLDDLDNEEDEVEVVAVKPASKKSKKKQQAQQKNMFAMSDDEEDEVADDLPNDSEEEEKEQLSNKAAKESKKEQQKQPEKEVEEQKVEQVLSEKVAAVSLKEKTPEPVPKAEPEPESEPQPDEEADAEVDSKFEESKEAKEKKLTHKEKKKQKKQQEYERQMELMTKKGGAGHSDLDNNFTMSQVQKSAGQKAALEQAVDIKIENFTISAKGNDLFVNANLLIAHGRRYGLVGPNGHGKTTLLRHIATRAFAIPPNIDVLLCEQEVVATDKTAINTILEADVRRTEMLKKADELEKQFVAGDLTVQEELNDTFAELKAIGAYSAEARARRILAGLGFSKEMQDRPTNKFSGGWRMRVSLARALYLEPTLLMLDEPTNHLDLNAVIWLDNYLQGWKKTLLIVSHDQSFLDNVCNEIIHLDQKKLQYYKGNYSMFKKMYVQKRREMIKEYEKQEKRLRELKAHGQSKKAAEKKQKESLTRKQEKNKSKQQKQDEDEGPQELLARPKEYIVKFRFPEPSQLQPPILGVHNVTFAFPSQKPLFIKVDFGIDLTSRVAIVGPNGVGKSTFLKLLLGELEPQEGEQRKNHRLHVGRFDQHSGEHLTAEESAAEYLQRLFNLPHEKARKALGSFGLVSHAHTIKMKDLSGGQKARVALAELCLSAPDVLILDEPTNNLDIESIDALAEAINEYEGGVIIVSHDERLIRETGCTLYVIEDQTINEIVGEFDDYRKEVLDSLGEVVNNPSVVANAAVLQ

SEQ ID NO: 164 - DNA, 465 bp, Drosophila melanogaster
  CDS (1)..(465): CT35402
atgtcgcgcagcgtgcgggcggagacgcgcagccgggcgaaggatgacatcaagcgggtgatgcaggcggtggacaaggtgcgccactgggagaagaagtgggtgaccatcagcgacaccaccatgaaaatctacaaatgggtgcccatcgcctccgccagtgagaagaaggccaagctggagtcctcgccgggatcggctgctgtccggagaccgccccccggctcgggcgttacgccggtcggcggcagcaagagcgataaggagaactctcagaagggcacgcccacgccgccgcagatcacgcccagctaccagggactaaccgccgaggactctaacacctgtttctccgtcgtgtccgacagccagggcgccgacttcgtgtcgagtatgcccttctctgaggactcgaactcgcagggcagcgatggacccgtgaagcgattgaagacgagcgactag

SEQ ID NO: 165 - protein, 154 aa, Drosophila melanogaster
MSRSVRAETRSRAKDDIKRVMQAVDKVRHWEKKWVTISDTTMKIYKWVPIASASEKKAKLESSPGSAAVRRPPPGSGVTPVGGSKSDKENSQKGTPTPPQITPSYQGLTAEDSNTCFSVVSDSQGADFVSSMPFSEDSNSQGSDGPVKRLKTSD

SEQ ID NO: 166 - DNA, 2463 bp, Drosophila melanogaster
  CDS (1)..(2463): CT21145
atgagtgaatcgattgcaattggctttttgcaatacataataacaataaattatgacgacgaggaggcacaagccaggaagactagccacgagaagagccagaagcccaagccgaagccggaggaaaaccataaggagaaggaagcgatctcgagaaaggcgtccggcgagggtgatctgatcaccgttgagatcaagcagggattgctgaggaagcagacggcaaccacgacgaccggccaggctatgaacagccacgcgactgccacgcagaacggacaaaccacggtcgtcggacaccatcgcggattctcgcagccctcggtgacggtggccgctgcagcggcaacgggcagcacggctggtgatccatggttcctgcagaccaccggtcaccagatgccacccactgcaccgttgcggcacaacaagcgtcctgccccccagccgaatgcggttttgggagcgggttcctcgggaacagcgcctggatcggcggttggcgccgtactgctccaccaacagcagctcagccagtcgcagccgcacattgtgccgcccagcataccgccgcaccaccaccaccatcgcgagaacaatgtgcaccccatccaggcgggcgcggcagccgcattgcatttgtcatcgcatgcgcttaatagtcataatttaatcagcagcgccagcaatcattcgcccaagtcccccagccagacgcagcagcagcaacagacgacgaaccagcagcaacaacagcagcagcagcaggcgtcccacagcatactgtccacgtttgcgcccgcccccactgtcgccgccgttcagccggcgggatcgcagtccgttgccggtaccgctgccgcagtggccgccgttgcccagcagcagcaacagcagcatcttcagctgctggccaactgtccgcccggtggagcgggtctaatgtcctcctccctgaatgcagcccaaatgggcatgcatggcgccgagcgagcgctgccgccaaagagtctggcgctgagtggcagccagcacggcagcaatatgctactgcacacagcaccgcaaccgccacaggcatcccagccagcggcagtcgtcggcgtcagtggtagcggatcggcgggtatgtccacctcgctgcacagcttcgatattaatggagtcacggcaggcagcggggtgaatgcgagcagcgcgtggtcaagcggatccaccactgccatgaaccatgcttccctctcgcccacagcgttggcaccgcaacaaggtcggtccaggtgcgaggtcaaactgaacgccatgccatggttccatggcagcataacgcgggatgaggcggagcatctgctgcagccgcgtgaggatggtttgttcctggttcgcgagtccacaaacttccccggcgactacacgctctgcgtttgtttccagtccaaggtggagcactaccgggtcaagtacctagagaacaagctgaccatcgacgacgaggaatactttgagaatttgggccagctagtggcgcactacgaggcggatgcggatggactgtgcacccagctgattaaatgcttgccaaagctgggcaaacaagagttttgcattaactccaaagatttcgtggacaagggctgggtgatccctgaagcggagctgcagctgcgcgagagcatcggcaagggcgagttcggtgacgtgatgctgggcatattacgcaacgagaaggtggccgtcaagatgctgaaggacgagggcgccgtgcagaagtttctggctgaggcctcggtcatgaccacgctggagcacgacaatttggtaaagtttatcggccttgtcttcaccagcaagcatctgtatctggttacggaatatatgagtaagggatcactggttgattacctgcgatcgcgaggacgacagcacataaccaaaaaggatcaaatcatttttgcctacgacactgcctctggtatggagtatctggaagccaaaaaggttgtccatcgcgatctggcagctcgcaatgtccttatatcagaggattgcgtggctaaagtatcggatttcggtttggcacgcgaggaatgctacaatcttgacgttggcaagctgcccataaaatggacggctcccgaggcacttaaaaatgggcgtttttccaacaaatcagacatgtggagctttggcatactgctatgggaaatctactcctttggacgcgtgccctatcccagaattccattagccgatgtggtaaagcacgttgaggtgggctacaaaatggaagcgcccgagggctgtccaccggagatttacgaaatgatgcggcaggcctgggacctaaatcccgccaagcgacccacattcgcggagctcaaggtcaaactgcagctactgaacaatgccacggcccatgggcagagccaatccctgccagaaatgggccagatccaaagctaa

SEQ ID NO: 167 - protein, 820 aa, Drosophila melanogaster
MSESIAIGFLQYIITINYDDEEAQARKTSHEKSQKPKPKPEENHKEKEAISRKASGEGDLITVEIKQGLLRKQTATTTTGQAMNSHATATQNGQTTVVGHHRGFSQPSVTVAAAAATGSTAGDPWFLQTTGHQMPPTAPLRHNKRPAPQPNAVLGAGSSGTAPGSAVGAVLLHQQQLSQSQPHIVPPSIPPHHHHHRENNVHPIQAGAAAALHLSSHALNSHNLISSASNHSPKSPSQTQQQQQTTNQQQQQQQQQASHSILSTFAPAPTVAAVQPAGSQSVAGTAAAVAAVAQQQQQQHLQLLANCPPGGAGLMSSSLNAAQMGMHGAERALPPKSLALSGSQHGSNMLLHTAPQPPQASQPAAVVGVSGSGSAGMSTSLHSFDINGVTAGSGVNASSAWSSGSTTAMNHASLSPTALAPQQGRSRCEVKLNAMPWFHGSITRDEAEHLLQPREDGLFLVRESTNFPGDYTLCVCFQSKVEHYRVKYLENKLTIDDEEYFENLGQLVAHYEADADGLCTQLIKCLPKLGKQEFCINSKDFVDKGWVIPEAELQLRESIGKGEFGDVMLGILRNEKVAVKMLKDEGAVQKFLAEASVMTTLEHDNLVKFIGLVFTSKHLYLVTEYMSKGSLVDYLRSRGRQHITKKDQIIFAYDTASGMEYLEAKKVVHRDLAARNVLISEDCVAKVSDFGLAREECYNLDVGKLPIKWTAPEALKNGRFSNKSDMWSFGILLWEIYSFGRVPYPRIPLADVVKHVEVGYKMEAPEGCPPEIYEMMRQAWDLNPAKRPTFAELKVKLQLLNNATAHGQSQSLPEMGQIQS

SEQ ID NO: 168 - DNA, 393 bp, Drosophila melanogaster
  CDS (1)..(393): CT5050
atgtcgctgaatccgcagtacgaggacattggcaagggatttgtgcagcagtactatgcgatattcgatgacccggcgaatcgggcgaacgtggttaatttctatagcgctaccgactcattcatgacctttgaaggccaccaaatacagggggcacccaagattctggaaaaagttcagagtctgagctttcagaagattaccagagtgataaccacagtggactcgcagccaactttcgatggcggagttctgatcaacgtccttggaagactacagtgcgatgacgatcccccacatgccttctcgcaggtctttttcctgaaggccaacgcaggcaccttctttgtggcccacgacatcttccgtctcaacatccacaactctgcctaa

SEQ ID NO: 169 - protein, 130 aa, Drosophila melanogaster
MSLNPQYEDIGKGFVQQYYAIFDDPANRANVVNFYSATDSFMTFEGHQIQGAPKILEKVQSLSFQKITRVITTVDSQPTFDGGVLINVLGRLQCDDDPPHAFSQVFFLKANAGTFFVAHDIFRLNIHNSA

SEQ ID NO: 170 - DNA, 417 bp, Drosophila melanogaster
  CDS (1)..(417): CT5086
atgttcgtgtcgacagtctctcgcattgccccagttgccaggagcgccttcctcgccaactccaagcagtacttgcgaccattgagcagcgccatcatcagccagagccagactttggccgctcagaacacaacccccgttgcattgctgccacagatcaggtcattccagacctcgccagtcacgcgtgacattgactcggccgccaaattcattggtgctggtgccgcaacagtcggtgtcgctggatccggtgctggtatcggaacagtattcggttccctcatcatcggctacgccaggaacccatcgctgaaacagcagctgttctcctacgccattctgggcttcgccctgtccgaggccatgggtctgttctgtttgatgatggccttcctgctgctgttcgccttctaa

SEQ ID NO: 171 - protein, 138 aa, Drosophila melanogaster
MFVSTVSRIAPVARSAFLANSKQYLRPLSSAIISQSQTLAAQNTTPVALLPQIRSFQTSPVTRDIDSAAKFIGAGAATVGVAGSGAGIGTVFGSLIIGYARNPSLKQQLFSYAILGFALSEAMGLFCLMMAFLLLFAF

SEQ ID NO: 172 - DNA, 306 bp, Drosophila melanogaster
  CDS (1)..(306): CT34491
atgagttccaagtcccttttcgacagcgaggaggatgccgctcaggccaacaaattatccaggaaagcaaaggaatcgcccttcatgcttgtgggtattaccggattcgtggccgccggattgattggagcgtacaagtaccggaaccgcggaacgatgagcaccagcgtcttcctgatgcagctgcgagtcgccgcccagggaaccgtcgtcggatgtctgaccctcggactggcctacagcatggccaaggagtacctgttcgacaaggcgcccaaggaaaacacaaagtcattgactaactaa

SEQ ID NO: 173 - protein, 101 aa, Drosophila melanogaster
MSSKSLFDSEEDAAQANKLSRKAKESPFMLVGITGFVAAGLIGAYKYRNRGTMSTSVFLMQLRVAAQGTVVGCLTLGLAYSMAKEYLFDKAPKENTKSLTN

SEQ ID NO: 174 - DNA, 4578 bp, Drosophila melanogaster
  CDS (1)..(4578): CT39345
atggtgagtaccaatctggtggtacccgtggtgctgtggggtcccaccgcgcccacgcactgcatctctagcgtgttcctctcggacgatcagtttaccctggtcaccggctgctacgatggacagatctgcctttggcaagtggagcccaccaccctgaagatgtcgccgcggtgcctcttggtgggccattcggcgcccgttttgtgcttagtgcgtgcctcgcttctgccggagaacaacttcctggtcagctcgtctgagaacggagagatgtgcacctgggatcttacggacggcaagtgcatggaggcggtcaagcttccacaggtgcacacccaaattcagagctaccacaccgccaacagcgaggatgtgcgcctcttttgcattggctactatgctgaaatcatggtcatggatccgttcagcctagaggtgatctacgtgctcagctcaaaggtcaaaccggattggatatccgctattcacgtactgcgccccatgcgtcgcaaggatgacgtagtgttggccatcaccaccaccggaaccgtgaaggtctggactctgacgggtaacgagaacaaacacgcggagcccatttacgagaacgaatccaaggagatccgctgcctgaatgccatcaccatgaattgctgcgcccagaaccagcgcacagtgctcttagtttgtaccaaatactggcagatctacgatgccggcgacttcactgtactctgctccgtaattgctcccgcaagggaacgttggcagggcggcgacttcatcacctccgaccgggtaatgctatggacagatgagggaaagggctacttgtacaagctgcccgcaaactgcattcccgacaacaaggagttccactcgaagagtgtggtcagggatgcaccttacctctactacgtgttgcaacacgccggtgataaggtgctgtcgtgccccccagccatgaagttgcttcagggcgccggtggccagcacaatctactgcgcggagactccgagggatacatctctgtctggaatgtgccggaggtgccgttagacaatattagcatactgcaggccaaacagatgccgccgcgacccctcaagccgcacgtgtgcacttcgttggtcgaggcgtggtccataatggatccaccaccagtgggcatcctggatcagctctcccgcatcacagaatcgccggtgaagctcacctcgagcatctatctgccacagcagagtcgcctggtgatcggacgcgaggatggcagcatagtcatagtgccagccacccagacagtgatgatgcagctgctggtgggcatcaagcaaaacttcagcgattggccctcgcatcagatcctctacggtcatcgtggaagggtcaattgcctgctctgcccctcgatgattcactcgagatatgagaagtcgcatctactttccggcggcatcgatttcgccgtgtgtctgtgggatctgtacagcggaagcttactgcataggttttgcgttcatgcgggtgagatcacacaactgctggtgccgccagagagctgtagtccaagaatcctgaaatgcatatgttcggtggcctcggaccattccgttacgctagtgtcccttcaggagcgcaagtgtgtgaccctggcaagcagacatctattccctgtggttaccattaaatggcgtcccctggacgactttctaatcgtaggctgttccgatggcagcgtgtatgtgtggcaaatggaaacgggtcacctcgatcgagtgcttcacgggatgctggcagaggaagtcctttccgcttgcgatgaacaggcggaggatggcggctcgggcggcggcggtggttccaatggtgcatctgccagcgagatgggtatggccaatccggcagtgcacttcttccgtggcctgaagtcgcgcaacatgaatgcaatccgtcatgctacccagcgcgggattacgcaactccagcaacttcagggtcataaccaaggaaacttcgactttctgatgaaacaccgcagcaatcctttagtgatccagggtcttcgtactaatcctaaggacgcggagagccacatacttttctttgacatcgagggactgatcttcgaattgcatagcgaggaatacgcacagatgacaccagctaccttggaatcacttggtgtccacctgcagaatcccaaagatggcaaatcgatgcatttggatgctagcaagaagatcggtgacttcttcaacaaggtgaagaacaaggccgtagatgtggagaagatcctgaaggacaaagacaaacacgggctggtgcagaagttcaaggagaaaactgagattgtcgagaagaaagtacaggccaaggtggagagcctgcaaaaggcagtagagccgcacgaggagcagcaggacctgaagagcaaaatcgcttccaagatggaggttacgcatgttatggaggtagcccagctacttctttcgctgctccattcttggggcctagatccacatctagacaagatgtgcgagacgcgcttgggcctgcttagacccattgtgcccatctcatacggagtgctttccaaggccggctatatgtcgctgctgctgcccacatggcagaacaactatgccataccacccggtatccagcttccctccagttccaagaagcgcccgctgccagaggagctgcagcgcttggagcatctcacggctgttttcacatcccgtctgcattgggagctcagcactacgttgaccaccaaccatattcttgcgctggtggccatgtccaatacgctgctgtcgatgagtgcggcctcctttctgccggacagcgagaagcacaagaagctgcagcgcttggcccagcgcacggactccacattgagcaacgaggaggagcgcgaggagctgatggcccaccacatctctcaaatcaagcacgcctggagcctgcttgctacccaccattgcttcctgttgcccgacaaaattgaggccctggagccgaagaaattcaagcgtccgcaggtggaaatgatggtcaagcgctggcagcatcactgcatagagatcagggaggcggctcagcagatccttttgggcgagcttacccggatgggcaagaagggtcgcaagcagctagtcgagagctgggcacaatatctgccactctacacgcacaccgagcccatagtgggagcccaacagcagttggccttgataagtcagccggcaagcggaggagctggctcgggatcgggcggcaatggaggggtgggcgtcggagtatccggaggcggtggtgctggtagtggtagcgggccaggtggcagcgttcctgggggagatgcccaccaagatgaagactacgaagaggaagaggaggagattatacgcaaaccatccagcttgtcggagctgaagcgcaaacaaactacggcagttatcctactgggtgtaataggagcagaatttggccaggatatatcccaggagtcaccgaatcaccgtggaagtattagcatggccacgggagcaaatctaaccagtggagttgctggcggggaacgtcgaaaatctagtgtcgtggagggcttcggcatagccaacaatctagcccgtcttacttcaatggccctggctcacttgctgtacgcgccaccatctcccaagctgccgcaatacacgccactgcgccgggcagccatcgatctgttgggtcgtggattcaccgtttgggagccgtacctggatgtgtccaaggtgcttcttggtttgctggagatatcgtgcgagggcaaagcagtgccaaatctgaactacaaacttccactaaccccgcaagcggatgcctgccgaaccgccaggcatgctctgcgcttgatagccaccgctcggccggcggcgttcatcactacgatggcgcgcgaggtagccaggtacaatacgatgcagcagaacgcgcagtccatcaacacgccgctcacccagtccgttctgcacaaggccaagggcgagattctgcagtgcgttgagatgctaatcgacaaaatgcagtcggagatcgccggcctcctggtggaagttatggacattgccctgcactgcgtggacggcaacgagctgaagaaccgcggcctggcggagctgtgtcctgccatctgcaagtttaaccagatctcgcactgcgcccaaacacgccgcatcgccgtgggcgccaacagtggcaacctggccatttacgagctgcgccagaacaagtgccagatgatcccggcccacacgcatccgatcacctcgctggccttctcgccggatggcaagtacctggtctcgtactcttgcgcagagaaccgcctctccttctggcagacctcaacggggatgttcggactgggccagtcgcagacgcgctgtacgaagggctactctacggcacccattccggatgtgtcgcgcctgaatccgatgcgcctggccaagcttgtgtggatcaacaatcgcacggtgaccctcatgctggccgacggctccgagacgcgattcaatgtctaa

SEQ ID NO: 175 - protein, 1525 aa, Drosophila melanogaster
MVSTNLVVPVVLWGPTAPTHCISSVFLSDDQFTLVTGCYDGQICLWQVEPTTLKMSPRCLLVGHSAPVLCLVRASLLPENNFLVSSSENGEMCTWDLTDGKCMEAVKLPQVHTQIQSYHTANSEDVRLFCIGYYAEIMVMDPFSLEVIYVLSSKVKPDWISAIHVLRPMRRKDDVVLAITTTGTVKVWTLTGNENKHAEPIYENESKEIRCLNAITMNCCAQNQRTVLLVCTKYWQIYDAGDFTVLCSVIAPARERWQGGDFITSDRVMLWTDEGKGYLYKLPANCIPDNKEFHSKSVVRDAPYLYYVLQHAGDKVLSCPPAMKLLQGAGGQHNLLRGDSEGYISVWNVPEVPLDNISILQAKQMPPRPLKPHVCTSLVEAWSIMDPPPVGILDQLSRITESPVKLTSSIYLPQQSRLVIGREDGSIVIVPATQTVMMQLLVGIKQNFSDWPSHQILYGHRGRVNCLLCPSMIHSRYEKSHLLSGGIDFAVCLWDLYSGSLLHRFCVHAGEITQLLVPPESCSPRILKCICSVASDHSVTLVSLQERKCVTLASRHLFPVVTIKWRPLDDFLIVGCSDGSVYVWQMETGHLDRVLHGMLAEEVLSACDEQAEDGGSGGGGGSNGASASEMGMANPAVHFFRGLKSRNMNAIRHATQRGITQLQQLQGHNQGNFDFLMKHRSNPLVIQGLRTNPKDAESHILFFDIEGLIFELHSEEYAQMTPATLESLGVHLQNPKDGKSMHLDASKKIGDFFNKVKNKAVDVEKILKDKDKHGLVQKFKEKTEIVEKKVQAKVESLQKAVEPHEEQQDLKSKIASKMEVTHVMEVAQLLLSLLHSWGLDPHLDKMCETRLGLLRPIVPISYGVLSKAGYMSLLLPTWQNNYAIPPGIQLPSSSKKRPLPEELQRLEHLTAVFTSRLHWELSTTLTTNHILALVAMSNTLLSMSAASFLPDSEKHKKLQRLAQRTDSTLSNEEEREELMAHHISQIKHAWSLLATHHCFLLPDKIEALEPKKFKRPQVEMMVKRWQHHCIEIREAAQQILLGELTRMGKKGRKQLVESWAQYLPLYTHTEPIVGAQQQLALISQPASGGAGSGSGGNGGVGVGVSGGGGAGSGSGPGGSVPGGDAHQDEDYEEEEEEIIRKPSSLSELKRKQTTAVILLGVIGAEFGQDISQESPNHRGSISMATGANLTSGVAGGERRKSSVVEGFGIANNLARLTSMALAHLLYAPPSPKLPQYTPLRRAAIDLLGRGFTVWEPYLDVSKVLLGLLEISCEGKAVPNLNYKLPLTPQADACRTARHALRLIATARPAAFITTMAREVARYNTMQQNAQSINTPLTQSVLHKAKGEILQCVEMLIDKMQSEIAGLLVEVMDIALHCVDGNELKNRGLAELCPAICKFNQISHCAQTRRIAVGANSGNLAIYELRQNKCQMIPAHTHPITSLAFSPDGKYLVSYSCAENRLSFWQTSTGMFGLGQSQTRCTKGYSTAPIPDVSRLNPMRLAKLVWINNRTVTLMLADGSETRFNV

SEQ ID NO: 176 - DNA, 1038 bp, Drosophila melanogaster
  CDS (1)..(1038): CT39414
atggccgagaacaagcaagtggatacagaaataaacggcgaggatttcaccaaggacgtgactgccgacggtccgggatctgaaaatggtgatgcgggcgccgccggctcgaccaacggcagttcggacaaccaatcggccgcatccggccagcgggacgacgacaggaaactgtttgtcggtggtctgagctgggaaacgactgagaaggaactccgcgatcacttcggcaaatatggcgagatcgagagcatcaatgtcaagacagatccccagaccggtcggtcccgaggattcgccttcatcgtgtttacaaacaccgaggccattgacaaagtcagcgccgcggatgagcacataatcaacagcaagaaggtcgatcccaagaaggccaaggccaggcacggcaagatctttgtcggcggcctcaccacagagatcagcgatgaggagattaagacctactttggacagttcggcaatatcgtcgaggtggagatgccattcgacaagcaaaagtcgcagcgcaaaggattctgcttcatcaccttcgattcggaacaggtggtgacggatttgctgaagacgcccaagcagaagatcgccggcaaggaggtcgatgttaagcgtgcgacgcccaagccggagaaccagatgatgggcggtatgcgtggtggaccacgcggtggtatgcgcggcggacgcggtggctacggaggacgaggtggctacaacaaccagtgggacggacagggatcatacggcggctatggcggcggctacggcggatatggtgccggtggttatggcgactactatgccggcggctactataatggatatgactacggttatgacggctacggttacggcggcggctttgagggtaacggctacggcggaggaggcggtggtggcaatatgggcggcggtcgcggtggaccccgcggcggcggcggccccaaaggcggtggcggttttaacggtggcaagcagcgcggaggcggtggacgccagcagcggcatcagccctactaa

SEQ ID NO: 177 - protein, 345 aa, Drosophila melanogaster
MAENKQVDTEINGEDFTKDVTADGPGSENGDAGAAGSTNGSSDNQSAASGQRDDDRKLFVGGLSWETTEKELRDHFGKYGEIESINVKTDPQTGRSRGFAFIVFTNTEAIDKVSAADEHIINSKKVDPKKAKARHGKIFVGGLTTEISDEEIKTYFGQFGNIVEVEMPFDKQKSQRKGFCFITFDSEQVVTDLLKTPKQKIAGKEVDVKRATPKPENQMMGGMRGGPRGGMRGGRGGYGGRGGYNNQWDGQGSYGGYGGGYGGYGAGGYGDYYAGGYYNGYDYGYDGYGYGGGFEGNGYGGGGGGGNMGGGRGGPRGGGGPKGGGGFNGGKQRGGGGRQQRHQPY

SEQ ID NO: 178 - DNA, 1125 bp, Drosophila melanogaster
  CDS (1)..(1125): CT39758
atggactacgatcgaattcgaccggtgcgatttttgacgggagtgctgaaatggtggcgtctctggccgaggaaggaatcggtgtccacaccggactggactaactggcaggcatatgccttgcacgttccatttacattcttgtttgtgttgcttttgtggttggaggcaatcaagagcagggatatacagcataccgccgatgtccttttgatttgcctaaccaccactgccttgggaggtaaagttatcaatatctggaagtatgcccatgtggcccaaggcattttgtccgagtggagcacgtgggatcttttcgagctgaggagcaaacaggaagtggatatgtggcgattcgagcatcgacgtttcaatcgtgtttttatgttttactgtttgtgcagtgctggtgtaatcccatttattgtgattcaaccgttgtttgatatcccaaatcgattgcccttctggatgtggacaccattcgattggcagcagcctgttctcttttggtatgcattcatctatcaggccacaaccattcctattgcctgtgcttgcaacgtaaccatggacgctgttaattggtacttgatgctgcatctgtccttgtgtttgcgtatgttgggccagcgattgagtaagcttcagcatgatgacaaggatctgagggagaagttcctggaactgatccatctgcaccagcgactcaagcaacaggccttgagcattgaaatctttatttcgaagagcacgttcacccaaattctggtcagttcccttatcatttgcttcaccatttacagcatgcagatggacttgccaggatttgccgccatgatgcagtacctagtggccatgatcatgcaggtcatgctgcccaccatatatggtaacgccgtcatcgattctgcaaatatgttgaccgattccatgtacaattcggattggccggatatgaattgccgaatgcgtcgcctagttttaatgtttatggtgtacttaaatcgaccggtgaccttaaaagccggtggcttttttcatattggtttacctctgtttaccaaggttgtattttctactctggaaaatccttgtataagttatctttatttcagaccataa

SEQ ID NO: 179 - protein, 374 aa, Drosophila melanogaster
MDYDRIRPVRFLTGVLKWWRLWPRKESVSTPDWTNWQAYALHVPFTFLFVLLLWLEAIKSRDIQHTADVLLICLTTTALGGKVINIWKYAHVAQGILSEWSTWDLFELRSKQEVDMWRFEHRRFNRVFMFYCLCSAGVIPFIVIQPLFDIPNRLPFWMWTPFDWQQPVLFWYAFIYQATTIPIACACNVTMDAVNWYLMLHLSLCLRMLGQRLSKLQHDDKDLREKFLELIHLHQRLKQQALSIEIFISKSTFTQILVSSLIICFTIYSMQMDLPGFAAMMQYLVAMIMQVMLPTIYGNAVIDSANMLTDSMYNSDWPDMNCRMRRLVLMFMVYLNRPVTLKAGGFFHIGLPLFTKVVFSTLENPCISYLYFRP

SEQ ID NO: 180 - DNA, 1899 bp, Drosophila melanogaster
  CDS (1)..(1899): CT40282
  misc_feature (551)..(551): The 'Xaa' at location 551 stands for Ser.
  misc_feature (572)..(572): The 'Xaa' at location 572 stands for Gly.
atgcaaaacgatatggtcagcataccggtggccaatttgaacggcggccttaaagcggccagcagcggttccggagttggtgtagtgacccccggcggcgtcgtatcctcggcggtgctggccaatgccccacgtgtatacctaacgccctcctccacattcatgaccaatcgccaaatggcgggagtggcgtccaccggaagaatgagcggacaagtcgtcggtggttcatctggcacagcctcaaccgccggtaccgttcgccatttttcgcaattcagcaaaatgcaaacggccggcggacccagtttgcaaaggaaacttgccaacggggataccattgttctggcaaccggcagtaaaaatatgttccttactagcagcgaaaataaggctaatctgccgaccgtcgccagcaatggcaatggtctgatcacagccaaaatggatctattggaggaggaggtcatgcagtcgataactgtgattgatgacgatgacgaggagaaaaaggaagtcgctgaagacgaagaagagagcagcaataatgccaaacccattgaccttcaccagccaattgctgataatgagcacgagctggacattgtgataaacaatgtggtctgctcgtttagcgtcggctgtcacctgaagctgcgcgaaattgcgctgcagggatcaaatgtggagtaccgtcgcgagaacggaatggtgacaatgaagctccgccatccatacaccactgcctcgatttggtcgtcggggaggattacctgcactggtgccacttccgagtcaatggccaaggtcgctgcacgccgctatgccagatgccttggcaagctgggatttcccactcgtttcctcaactttcgcattgtcaacgtactgggcacctgcagcatgccgtgggccatcaagatcgtcaacttttcggagcgccatcgcgagaacgccagctacgagcccgagctgcatcctggagtgacttacaagatgcgcgatcccgatccaaaggccaccctgaagatcttctccaccggcagcgtaacagtcaccgcggctagcgtaaaccacgttgaatcggctatccagcacatatacccgctggtctttgatttccgcaagcaacgttcggcggaggagctgcagcatctgcgtcaaaagcagcgtctgcaagccggcggtgatccccacgaactggagaaaaatgtcttggccgataacaagactgcttcccttgataatatctttgttaatacaacagcggcgcactctaaatcatcgtcgaatgaccaaacatcagcacccgcgaccatcttgtccagcacagttgatagtatgcctcgtctgaaacagatggtcaactatcaccagatgatgaagcaaacccaggaagagcgccgccatataatgtttaatggggagaaggccaatccggcctccacctcatcggcggcagcagctccctccacctcctcctcatcgtcctcatccggggataatatctgtgccaatgcccgtcgccgggccaccgaatgctgggcaaccaagctgcagaataagcgtccacgttacaatgatcccggtaccacgggcacaattaacgccgcatcgtccacagcatcagccgccacatcttcgttagcctcycaggcgacacatctgcgtaatcctctcaagacggccgcgttggccaatgcacgtatgttaggygccaaggtgacaacatgcacacgcaacagcataatcgtgcagcagccgcaacgtatccaaatgcagcagcagcagcaacagctgcaaccgcagcagcaacagaccagcttctcgcccagcgaattcgatgttgatgacttgatcgaggaggaggagaacaacgaattggatatgcccttctaa

SEQ ID NO: 181 - protein, 632 aa, Drosophila melanogaster
  misc_feature (551)..(551): The 'Xaa' at location 551 stands for Ser.
  misc_feature (572)..(572): The 'Xaa' at location 572 stands for Gly.
MQNDMVSIPVANLNGGLKAASSGSGVGVVTPGGVVSSAVLANAPRVYLTPSSTFMTNRQMAGVASTGRMSGQVVGGSSGTASTAGTVRHFSQFSKMQTAGGPSLQRKLANGDTIVLATGSKNMFLTSSENKANLPTVASNGNGLITAKMDLLEEEVMQSITVIDDDDEEKKEVAEDEEESSNNAKPIDLHQPIADNEHELDIVINNVVCSFSVGCHLKLREIALQGSNVEYRRENGMVTMKLRHPYTTASIWSSGRITCTGATSESMAKVAARRYARCLGKLGFPTRFLNFRIVNVLGTCSMPWAIKIVNFSERHRENASYEPELHPGVTYKMRDPDPKATLKIFSTGSVTVTAASVNHVESAIQHIYPLVFDFRKQRSAEELQHLRQKQRLQAGGDPHELEKNVLADNKTASLDNIFVNTTAAHSKSSSNDQTSAPATILSSTVDSMPRLKQMVNYHQMMKQTQEERRHIMFNGEKANPASTSSAAAAPSTSSSSSSSGDNICANARRRATECWATKLQNKRPRYNDPGTTGTINAASSTASAATSSLAXQATHLRNPLKTAALANARMLXAKVTTCTRNSIIVQQPQRIQMQQQQQQLQPQQQQTSFSPSEFDVDDLIEEEENNELDMPF

SEQ ID NO: 182 - DNA, 2169 bp, Drosophila melanogaster
  CDS (1)..(2169): CT5456
atgagcagccagggacaccataagatgtccggcggcggcaagaagggcgccatggagcaggactacaccgacgtggtcgatctgggcgatcgcttctcagcggacatggcgcgcctctgcatgaacgaacagtacgcggacgtggagttcatcgtcgaggaggagcgcatacccgcccaccgcgtcatactcgcggcacgcagcgaatacttccgggcgctgctgtacggcggcatggcggagaccacacagcgccaaataccgcttgaggtgccgctggaagcgttcaaggtgctgctgcgctacatttactcgggcacactgctgctgtccacattggacgaggattccaccatcgatgtgctgggcatggccaatcagtatggtttccaggatctggagatggccatatcgaattatttacgccagtatctggccttggacaatgtctgcatgattcttgatgcggcgcgtctatacaatctagaggaactcaccgaggtttgcctaatgttcatggatcgcaatgccggcgacctgctgctgcacaacagcttcaatacgctatccaaggaatcgctggaggaggtactacggcgtgactgcttcttcgcccccgaggtgcagatctttttggccgtgtggaagtggagccgcttcaatagcaacgtggacttcaagtccgtggttagttatgtccgcctgccactgatgaacctcgagcatctgctgcaggtggtgcgtccctcgggcatcctggatcccgacaagattctcgacgccatcgacgagcgcagcacttcaaaggcgctgccctacagggcggcgctctggccggaggaaaacgtggccgcggagacgtttttgtcgcgctgcatccagggagagtgtcgcgacgcgctgctggatggagatgtgaccacctatgacatggagaacgggtatacgcgccactgcattacggacagcaaagatgcgggcattgtggtcgaattgggcacgttctgcatgatcaatcacattcgcatgctgctctgggacagagacagccgggcgtactcctactacgttgaggtgtccggcgaccagcagcattgggatcgcgtggtcgactacagcgactaccactgccgctcctggcaatacttatacttcgaagcacgacccgtcagattcattcgactggtgggcacccagaacactgtaaaccgggtattccatgttgtgggtctggaagccatgcacacggccaaggtgccgcgtttagttaaccattttgtggcgcccaagacgaacgtggccaccgtagagatgagcgccattgtgacggacggcgtgagtcgcacccgcaacgcgcttatcaacggcgattatgtgcgctacgactgggactcgggatatacttgccaccaattgggcagcggcgagatcgtcgtccgtttgggccaaccctactatttgggctcaatgaggctgttgctgtgggactgcgatgatcgcacctacagcttctacatcgaaatttcgacgaaccgcaaggaatggcaaatggtcgtggaccgccgcaacgacaggacccgctcctggcagaactttcactttactccgcgtccagtggtctatatccgcattgtgggcacacgcaacacagcgaatgagatcttccactgcgtccacctcgaatgtccgacccaggacaaaaactacttaaagaagatagccgacatggagaaggagcgcgagaagagggagaaggagaagaagacggccaagactgacgatgacaatattgcctctacctcgggatcctcgttggcttcaggccatgctgaaagtccctccacttcctccagcagcagccaaagcgttttaaggtccatccactggccgccacagacaagggaagtggccgttgccccactcactccgccagcactctccccgcccggcacgccagcacttccggctcctctgaccccggcaacctcgtcgccgcataacaaccatgaacaaaatcagccaagtaatatcagtgcagacgcaagccaccacaccagtccaagttcaaggagcaaccccagtcccagcctaagtaggagcagaagccagagtgcggagttggagccagtgccgccattggttgagcttgacaccagggagacgctctaa

SEQ ID NO: 183 - protein, 722 aa, Drosophila melanogaster
MSSQGHHKMSGGGKKGAMEQDYTDVVDLGDRFSADMARLCMNEQYADVEFIVEEERIPAHRVILAARSEYFRALLYGGMAETTQRQIPLEVPLEAFKVLLRYIYSGTLLLSTLDEDSTIDVLGMANQYGFQDLEMAISNYLRQYLALDNVCMILDAARLYNLEELTEVCLMFMDRNAGDLLLHNSFNTLSKESLEEVLRRDCFFAPEVQIFLAVWKWSRFNSNVDFKSVVSYVRLPLMNLEHLLQVVRPSGILDPDKILDAIDERSTSKALPYRAALWPEENVAAETFLSRCIQGECRDALLDGDVTTYDMENGYTRHCITDSKDAGIVVELGTFCMINHIRMLLWDRDSRAYSYYVEVSGDQQHWDRVVDYSDYHCRSWQYLYFEARPVRFIRLVGTQNTVNRVFHVVGLEAMHTAKVPRLVNHFVAPKTNVATVEMSAIVTDGVSRTRNALINGDYVRYDWDSGYTCHQLGSGEIVVRLGQPYYLGSMRLLLWDCDDRTYSFYIEISTNRKEWQMVVDRRNDRTRSWQNFHFTPRPVVYIRIVGTRNTANEIFHCVHLECPTQDKNYLKKIADMEKEREKREKEKKTAKTDDDNIASTSGSSLASGHAESPSTSSSSSQSVLRSIHWPPQTREVAVAPLTPPALSPPGTPALPAPLTPATSSPHNNHEQNQPSNISADASHHTSPSSRSNPSPSLSRSRSQSAELEPVPPLVELDTRETL

SEQ ID NO: 184 - DNA, 696 bp, Drosophila melanogaster
  CDS (1)..(696): CT41472
atgcaaattttcgttaagaccctcactggcaagaccatcactttggaggttgagccatccgataccattgagaacgttaaggccaagatccaggacaaggagggaatccccccagatcagcagcgtttgatcttcgccggaaagcagctggaggactggacgcacctctgtccagactacaacatccagaaggagtcgacccttcacttggtcctgcgtctgcgtggtggcatgcagatctttgtgaagaccctcactggcaagaccatcactttggaggtcgagccatccgataccattgagaacgttaaggccaagatccaggacaaggagggaatccccccagatcagcagcgtttgattttcgccggaaagcagctggaggacggacgcactctgtccgactacaacatccagaaggagtcgacccttcacttggtcttgcgtctgcgtggtggcatgcagatcttcgttaagaccctcactggcaagaccatcaccttggaggtcgagccatccgataccattgagaacgttaaggccaagatccaggacaaggagggaatccccccagatcagcagcgtttgattttcgccggaaagcagctcgaggacggacgcactctgtccgactacaacatccagaaggagtcgacccttcacttggtcctgcgtctgcgtggtggcgccatctaa

SEQ ID NO: 185 - protein, 231 aa, Drosophila melanogaster
MQIFVKTLTGKTITLEVEPSDTIENVKAKIQDKEGIPPDQQRLIFAGKQLEDWTHLCPDYNIQKESTLHLVLRLRGGMQIFVKTLTGKTITLEVEPSDTIENVKAKIQDKEGIPPDQQRLIFAGKQLEDGRTLSDYNIQKESTLHLVLRLRGGMQIFVKTLTGKTITLEVEPSDTIENVKAKIQDKEGIPPDQQRLIFAGKQLEDGRTLSDYNIQKESTLHLVLRLRGGAI

SEQ ID NO: 186 - DNA, 1587 bp, Drosophila melanogaster
  CDS (1)..(1587): CT42468
atgaaaccaacagctggccaaacgggttttctggccctactgctgttctgcctgctgagctgcgtgtctgcctacaactacctggtggtgctccataccgccgcacgatcccattaccatgtgggatctgccctggccaagggattagccgctgcgggacatcaggtgaccatcatctcccccttcgagctgaagaaacccatcaagaacatcaaagatgttccggccaagagcattctgacttccatgcagggaagaattgctaaccttttgcaaagctcaaaggagcccataatcaagcagatcattaactttcacgaaatgggtattgaaataaccgaattgctgctgaaggaaccatctgtgatagaactgatgaaatccaaccagaccttcgatgccgtaatatccgaggtgttcctgaacgaagctcacttcggattcgccgagcatttcaaggctccacttataggactgggcacctttggagctattagctggaacaccgatctggtgggatctccttcaccgccctcgtatgttcccagtgcactgctgaagtttagtgaccgcatgtccctcgtagagcgagtgggcaaccaggccttcctcacctacgaatatatcttcctcaactacttctatctgccgcgccaggaggtcctctaccgcaagtacttccccaataacaagcaggacttttacgatatgcgcaagaacacggctctggtgctgctcaatcaacatgtatcgctcagttttccacgaccctactcacccaatatgatcgaggtgggcggcatgcacatcaatcgaaagcgccagccgctgcccaaggacattctggagttcattgagggtgccgagcatggagttatctacttctcgatgggctccaatctgaagagcaaaacactgccgttggaaaaacgccaggcgctgatcgacacctttgcccagctgaagcagcgtgtgctgtggaagttcgaggacacggatctgcccggaaagcccgccaatgtgttcatctcggactggttccctcaggacgacatcctggcccatgacaatgtgctggcctttattacgcacggcggtctgctcagtaccacggagtccatttaccatcgcaaacccttcgtgggcattccaatctttggcgatcagttcctgaacatggctcgtgccgagcagaatggctacggggtgactgttcattacgaggaattgagttctgccaagcttttggctgcgattcagaaaataatcaacaatcccgaagccacccagagggtgcgcgacatgtccgacagatatcgcgatcagcagcagactcctttggagcgggccgtttattgggtggagcatgtgtcccggcataagggtgccaagtatctaaggagcgcctcccaggatctgaatttcattcaataccacaatctggacgcaatgctgatactatatggcggcattatattcgtgctctattgtattttcctgctgatccgtttagtgtggcgactcctgcaggaattatttattaagaaggacacttccaagccaaagcagaaagccaagcggaattaa

SEQ ID NO: 187 - protein, 528 aa, Drosophila melanogaster
MKPTAGQTGFLALLLFCLLSCVSAYNYLVVLHTAARSHYHVGSALAKGLAAAGHQVTIISPFELKKPIKNIKDVPAKSILTSMQGRIANLLQSSKEPIIKQIINFHEMGIEITELLLKEPSVIELMKSNQTFDAVISEVFLNEAHFGFAEHFKAPLIGLGTFGAISWNTDLVGSPSPPSYVPSALLKFSDRMSLVERVGNQAFLTYEYIFLNYFYLPRQEVLYRKYFPNNKQDFYDMRKNTALVLLNQHVSLSFPRPYSPNMIEVGGMHINRKRQPLPKDILEFIEGAEHGVIYFSMGSNLKSKTLPLEKRQALIDTFAQLKQRVLWKFEDTDLPGKPANVFISDWFPQDDILAHDNVLAFITHGGLLSTTESIYHRKPFVGIPIFGDQFLNMARAEQNGYGVTVHYEELSSAKLLAAIQKIINNPEATQRVRDMSDRYRDQQQTPLERAVYWVEHVSRHKGAKYLRSASQDLNFIQYHNLDAMLILYGGIIFVLYCIFLLIRLVWRLLQELFIKKDTSKPKQKAKRN

SEQ ID NO: 188 - DNA, 5043 bp, Drosophila melanogaster
  CDS (1)..(5043): CT13908
atgtcaaatacgacgaggtccagccgagttaccatcggtagaattggaaccacgccacagatcacagatccatggtcgtccggcttggagaagcagcgaccttcccgctgtggaggccccaaatctctcgcagagccaacgtaccgaaagatcggacggcgaaagatgatgctccatatgcgagtccatgaccctggaacgactgtaacacaaagagcaaaagaaacggcaacggcaaaactcaatagaatctatttatgtacatttaaccgaatggcacagagctgtatatattttgtattatttttagtaatcctaagcccaaatactagttgtgctctacggagtagtgcgggtgagactcagaattatgtcggaatactcagcaacgatagtgcaacgaccacatatgatgtgtcgtccctgcacagcagtagaagaacaaatcccccatcatcatcatcatcatcgaatgttgatgttgattatcgtaatgacagagagctccacaaggtcgacctgtttggcctgggaggtgaaagagcgggtcaagctgagaccattagcggcggcaaatacgattataactatgaaaatactcacacaaatgccagtgcgaaagatgaaattgttgaccagcttgaacggcagtcaaatagcctcgacttcgacggggtcgatatgtttggcgccttcagcattccggaagaggcgatatacacaaatgagttcgccgtcaacattccagctggcaagcaaatggcagatgttatagctaccaaacatggatttatcaatagaggacagattggatcgctggacaactactatctgtttcagcatcatcatgtatcgaagcgttcgctgcgctccagtcgcaaacatcagggcgcccttaaatcagagaacgaggtgaaatggatgcagcaacagcacgagaaggtgcgccgaaagagggacggcccgtaccaggatttacccacctacagtccgtataatcttttacgccaacacggcggctacgttgtcgatccgaatccgcatctttcattctccccagaatcgatttcgttagcctcgcactcacagcgcatggagtaccgggatgtcagctcgcatttcatctttccggatccgttgtttaaggaacagtggtatctgaatggcggcgccaaggatggcttggacatgaatgtgggtcccgcctggcaaaagggctacaccggcaagggcgtggtcgtgtccattctggacgatggcattcagacaaaccatcccgatttggcccaaaactatgatcccgaggcctctttcgatataaatggcaacgattcggatccaacgccccaggacaatggtgacaacaagcacggaaccagatgtgccggcgaagtggccgcggtggctttcaacaatttttgcggagtgggagtggcctacaatgccagcattggtggagtacgaatgctggacggaaaggtcaacgatgtggttgaggcccaggcattgagtcttaatccgtcacacatcgatatatacagcgcttcctggggaccggaggatgatggctccactgtcgatggtcctggtccgttggcccgccgagccttcatctacggagtgaccagcggacgacagggcaagggctcgatattcgtttgggcctctggcaacggtggacgctacactgactcctgcaactgcgatggctacaccaattcgatcttcaccctttccatttcgagtgccactcaagccggcttcaagccctggtacctggaggagtgctcctccacgctggctaccacctacagctccggaacgccgggacatgacaagagcgtcgccaccgtcgacatggacggcagcctgagacccgatcatatatgtacggtggaacatacgggcacctcggcatcggcaccactggcagccggcatttgcgccctggcgctagaggccaatccggaattgacttggcgcgacatgcaatacttggtggtgtacacatcaagaccggcgccactggagaaggagaacggatggacactgaacggtgttaagcgaaagtatagccacaagtttggatacggtttaatggatgctggagcaatggtgtcactggcggagcagtggacatcggtgccgccgcagcacatctgcaagtcgcgggaaaataatgaggatcgcaagatagatggtgcatacggttccaccttgtccacgcatatggatgtcaatgggtgtgcgggcacgatcaatgaagtgcgttacctagagcatgtccaatgtcgcattaccctacggtttttcccgcgcggaaatcttcgcatactgctcacctcaccgatgggcaccaccagtaccctgttgtttgagaggccgcgcgacatcgtcaagtccaacttcgatgactggcccttcctgagtgttcacttttggggcgagaaggcggagggtcgctggacactgcaggtgatcaacggcggacgccggcgcgtcaatcagccgggcatcctgtccaagtggcagctgatattctatggcacttccactcagcccatgcggctcaagtccgagctgctgaacagcagtccccagttgcgcagcccaagcagctccaatccgttcctcttcccatcggcctcgaacattggccagcctgccaacgagggtgggaacttcaatacggatagctttgccagttacctcaactatcagaacatctttagcagcgctggctccgatccggaaccggcaacagctacattggacggtcagaatgtgaccgcagcgattgctggcggctcgtcggctgaatcccttggatttaccgcctctgctgctcaactggtagcggcgcccgaaacgagggatggcgacaagaagatcctgcactcctgcgatgccgagtgcgactcctccggctgctatggccgtggacccacacagtgcgttgcctgcagtcactaccgcttggacaatacttgtgtaagtcgctgcccaccgcgttcctttcccaaccaggttggaatctgctggccctgtcacgacacctgcgaaacgtgcgccggtgccggacccgacagctgcctcacatgtgctccggcccacctgcacgtcatcgatctcgccgtctgcctgcaattctgcccggacggatattttgaaaacagcaggaatagaacgtgcgttccctgcgagcccaactgtgcctcatgccaggaccatcccgagtactgcactagctgtgatcaccatttggttatgcatgagcacaaatgctactcggcctgtcccttggatacgtacgaaacggaggataacaaatgtgccttctgccactcgacttgcgccacctgcaatggccccacggaccaggactgcatcacgtgccgctcgagtcgatatgcctggcaaaacaaatgccttattagctgtccggacggattctatgccgacaaaaaacgtctggagtgcatgccctgccaggagggatgtaagacctgcaccagcaacggagtttgctccgagtgccttcaaaactggacgctaaacaagagggacaagtgcatcgtgagcggcagcgaaggctgcagtgaatctgagttctacagccaggttgagggacaatgccgcccgtgccacgcctcctgcggcagctgcaacggtccagcggataccagctgcacgtcctgcccgccgaatcgactgctggaacagagtcgctgtgttagcggctgtcgcgagggcttcttcgtggaagcgggctccctatgctcaccatgtctgcacacgtgcagccagtgcgtctcgcggacaaactgcagtaactgctccaagggtctggagctgcagaatggcgaatgtcgcaccacctgtgccgatggatactacagcgatcgtggcatttgcgccaagtgctatctcagctgtcacacctgcagcggaccgaggcgcaaccagtgcgtccagtgcccggctggatggcaactggccgccggcgaatgccatcccgagtgccccgagggcttttacaaatcggactttggatgccagaagtgtcaccattactgcaagacgtgcaatgatgctggaccattggcgtgcacgtcgtgtccgccacactcgatgctcgatggcggtctgtgcatggagtgcctgagctcacaatattacgatacgacgtcggcaacatgcaaaacgtgccacgattcgtgccgctcctgcttcggacccggccagttctcgtgcaagggttgtgtgccgccgcttcatctggaccagctgaacagccagtgtgtgtcctgttgtcagaatcaaacgttggccgaaaagacttcgtcagcggcgtgctgcaattgcgatggcgaaaccggcgaatgcaaggctacctcgacgggtggcaagcggcgcacggttgtgggcagtggtagtgcgtacaaaagcagcgaatccaagcacggatccttcgagaacgatggcaatgccagggagttcgtcctgcgactggactctccgctgacggcaatcacagccatagctgtggccatatgcctgctgatcataacaatattctccatcatctttgctgttttacagcgcaacagcaaccatgtatccagaaattcagtgcgatataggaaaatagcgaacacgtcgtcgggcaggcgaaagaacttgtccgctaagcccaccagcgatgcaagattcatttttaacattggcgaggacgatgatacagatggtgataattccgatgacgagttggacggcaacgtgggcacagatataaacaacaggatcgtctacgaccgcaaaggcaatgatcatggacacgaattttacattgagagtacaaatgatattgatgcgatcgagtttcactgcaatggagccggagcccagaaagcagagacccaattacaaaggtgcaatgcgaacggagatgatgatgatattcttcattacgataggcatacgaatgcggaacgaaaaaatcatccttcctcaaccacaagccgtacaaacatccgtagctga

SEQ ID NO: 189 - protein, 1680 aa, Drosophila melanogaster
MSNTTRSSRVTIGRIGTTPQITDPWSSGLEKQRPSRCGGPKSLAEPTYRKIGRRKMMLHMRVHDPGTTVTQRAKETATAKLNRIYLCTFNRMAQSCIYFVLFLVILSPNTSCALRSSAGETQNYVGILSNDSATTTYDVSSLHSSRRTNPPSSSSSSNVDVDYRNDRELHKVDLFGLGGERAGQAETISGGKYDYNYENTHTNASAKDEIVDQLERQSNSLDFDGVDMFGAFSIPEEAIYTNEFAVNIPAGKQMADVIATKHGFINRGQIGSLDNYYLFQHHHVSKRSLRSSRKHQGALKSENEVKWMQQQHEKVRRKRDGPYQDLPTYSPYNLLRQHGGYVVDPNPHLSFSPESISLASHSQRMEYRDVSSHFIFPDPLFKEQWYLNGGAKDGLDMNVGPAWQKGYTGKGVVVSILDDGIQTNHPDLAQNYDPEASFDINGNDSDPTPQDNGDNKHGTRCAGEVAAVAFNNFCGVGVAYNASIGGVRMLDGKVNDVVEAQALSLNPSHIDIYSASWGPEDDGSTVDGPGPLARRAFIYGVTSGRQGKGSIFVWASGNGGRYTDSCNCDGYTNSIFTLSISSATQAGFKPWYLEECSSTLATTYSSGTPGHDKSVATVDMDGSLRPDHICTVEHTGTSASAPLAAGICALALEANPELTWRDMQYLVVYTSRPAPLEKENGWTLNGVKRKYSHKFGYGLMDAGAMVSLAEQWTSVPPQHICKSRENNEDRKIDGAYGSTLSTHMDVNGCAGTINEVRYLEHVQCRITLRFFPRGNLRILLTSPMGTTSTLLFERPRDIVKSNFDDWPFLSVHFWGEKAEGRWTLQVINGGRRRVNQPGILSKWQLIFYGTSTQPMRLKSELLNSSPQLRSPSSSNPFLFPSASNIGQPANEGGNFNTDSFASYLNYQNIFSSAGSDPEPATATLDGQNVTAAIAGGSSAESLGFTASAAQLVAAPETRDGDKKILHSCDAECDSSGCYGRGPTQCVACSHYRLDNTCVSRCPPRSFPNQVGICWPCHDTCETCAGAGPDSCLTCAPAHLHVIDLAVCLQFCPDGYFENSRNRTCVPCEPNCASCQDHPEYCTSCDHHLVMHEHKCYSACPLDTYETEDNKCAFCHSTCATCNGPTDQDCITCRSSRYAWQNKCLISCPDGFYADKKRLECMPCQEGCKTCTSNGVCSECLQNWTLNKRDKCIVSGSEGCSESEFYSQVEGQCRPCHASCGSCNGPADTSCTSCPPNRLLEQSRCVSGCREGFFVEAGSLCSPCLHTCSQCVSRTNCSNCSKGLELQNGECRTTCADGYYSDRGICAKCYLSCHTCSGPRRNQCVQCPAGWQLAAGECHPECPEGFYKSDFGCQKCHHYCKTCNDAGPLACTSCPPHSMLDGGLCMECLSSQYYDTTSATCKTCHDSCRSCFGPGQFSCKGCVPPLHLDQLNSQCVSCCQNQTLAEKTSSAACCNCDGETGECKATSTGGKRRTVVGSGSAYKSSESKHGSFENDGNAREFVLRLDSPLTAITAIAVAICLLIITIFSIIFAVLQRNSNHVSRNSVRYRKIANTSSGRRKNLSAKPTSDARFIFNIGEDDDTDGDNSDDELDGNVGTDINNRIVYDRKGNDHGHEFYIESTNDIDAIEFHCNGAGAQKAETQLQRCNANGDDDDILHYDRHTNAERKNHPSSTTSRTNIRS

SEQ ID NO: 190 - DNA, 1809 bp, Drosophila melanogaster
  CDS (1)..(1809): CT5890
atgagcaagtaccataaggagcgcaagtacgccaagttcaggtactacatggagaagtactacgtgctgccgctggagctgaagaacgacatcatctactgccagcgatcgctgcgcgatttcctcaaggttcacgcgttggtctcggaggtcttcgatgagcaggcggatgcggatccagtgcagatgcgtcgcatcttggacgaactggaggaggaggtgtacgagatcaatgccgagcagcagttccttctgctacgcctcaacgatagcctacaggaattctccgtgaagctgaaggagaacaacatcatgttcctgccggacatcgcccatgagtacgtttccgcccaggtagtgcctttgatcgtcgatcccaactataagattatgccacagtcggtgatggctcgtgataccgaggagatgcttattcgcaagcacttcctgctgagccaggacgatgattctggtatgccgccgcttaagctcagcgaattggatgagaatataccattgatgctggctccgccggttaggggattgggtcagcagatcgccgccgttaagccggagccagagtggctccaaggcgatgaggcgacagtatcagtgccaccgccgccgccacaatcgaagtcgaagctgatgaaagggtcgctggattcgaccccggccaagcgagagaatatcagccgcagctcaccgccgcccttggcgcctataacccaaaccgtagtggctgagttgtcacaagtacctccatcaccacaagcagaatctccaccagtaaactttcacgttgtggcccagagtcgcaagaacttgcagcaggcattgagaagggccagaaagacgaagcagcagccacgtttgttcgacgacgaggaggacctggagatcaccagtttgcagaacgatcgcaacaagaacagaaccagcgatggcaaggggacaccgccatcgctggagccaacgaatgctgccgccaatcaggcagccaagaagaccatcccacaaatgtctagtcaggggatggcgaagaataataccgcgaagagcaaaaacacgtgcaggaaatcctcgccaacgcccacatccagtggacagtcgcagccagcggtatcgtcatccggcagctccgatgattccagtgccgagctgcagcaggagcagcaaagacgcgtcgcatccgccgcccagtggcgcgatgagccgcgcgagagccgcacccagccggaggagtacggccaggagacgttcctcggcctctttgagctctactcgccggaggtgctcaagaagctcagtcagcgccactcgaagcgcaagcgtcgcaccgttcagaatgccagcggagtggattttcactatggccagcagttgaatgccgtggacgcgttagtcatgggcgttcgtggtcagaagaagaccaaggagaagtccgaattcctgctctcgccgacggaaaaacgtttgcaggccaactcgaagaggacgtacacacgcaagagcaagtcgccggacgagatttcggagaagagcagcgcaggaggaggatctggcgcatcgggaactgcgtcttcatcagcctgtcagcataaagacggcggtgcctccaagtgccgcaaatgccgcgagtgccgtgaatgcaaacgtcgtgtggaaaccgaagcgatgtactgccacttgtgcagcggattataccacatggactgccacgagttcaccaaaaatcgccagctgatgcagctgcagaactctcgctgccccccatgcttgcgcgaaaaagataagttggagaagtaa

SEQ ID NO: 191 - protein, 602 aa, Drosophila melanogaster
MSKYHKERKYAKFRYYMEKYYVLPLELKNDIIYCQRSLRDFLKVHALVSEVFDEQADADPVQMRRILDELEEEVYEINAEQQFLLLRLNDSLQEFSVKLKENNIMFLPDIAHEYVSAQVVPLIVDPNYKIMPQSVMARDTEEMLIRKHFLLSQDDDSGMPPLKLSELDENIPLMLAPPVRGLGQQIAAVKPEPEWLQGDEATVSVPPPPPQSKSKLMKGSLDSTPAKRENISRSSPPPLAPITQTVVAELSQVPPSPQAESPPVNFHVVAQSRKNLQQALRRARKTKQQPRLFDDEEDLEITSLQNDRNKNRTSDGKGTPPSLEPTNAAANQAAKKTIPQMSSQGMAKNNTAKSKNTCRKSSPTPTSSGQSQPAVSSSGSSDDSSAELQQEQQRRVASAAQWRDEPRESRTQPEEYGQETFLGLFELYSPEVLKKLSQRHSKRKRRTVQNASGVDFHYGQQLNAVDALVMGVRGQKKTKEKSEFLLSPTEKRLQANSKRTYTRKSKSPDEISEKSSAGGGSGASGTASSSACQHKDGGASKCRKCRECRECKRRVETEAMYCHLCSGLYHMDCHEFTKNRQLMQLQNSRCPPCLREKDKLEK

SEQ ID NO: 192 - DNA, 14391 bp, Drosophila melanogaster
  CDS (1)..(14391): CT5932
atgcaacgacaaaatccgaacccgtaccagcagcaaaaccagcagcaccagcaggtgcagcagttctccagccaggagtactcgcactccagccaggagcagcaccaggagcaaaggattagccgcaccgagcagcacgtccagcgcagccaggtcaccacccagcggcaagtgcaacaacatcatggtggcagcatcggaggcgcctacgtgcccccttcgctgacacacgtgtacgcccagggcgatatctcgccgcccgtcttcgagcagatcttcaagaacgctcgcttcgcccagggcggcaatgccctgttcgagggacgcctgcgtggcaacccgaagccattcgtgacctggacccgaaaaggcgcaccccttctcgagtcgcagaagttccggatgagctacaacgaggccaccggcgatgtgtccctgctgatcaatcagatcggtcccggcgacgagggcgagtacacgtgcactgcccgcaatcagtatggcgaggccatctgcagcgtctacatccagccggagggagcaccgatgcccgccctgcagcccatccagaatctggagaagaacatctactcgaacggatactcgtacacctccattgaggaggagttccgtgtggacacgttcgagtacaggcttttacgcgaggtttccttccgtgaggccatcacccgtcgatctggctacgagcaggactcccagctctcccaggagctggaccgcaatcagggtcctgcgcaggcgccgcagatctcgcagaaaccgcgtagctccaagctaatcgagggatccgatgccgtgttcaccgcacgcgtcggctccaaccccaagccccggctcacctggttccataatggccagcgattggtggcctcgcagaagtacgagatctcctattcgagtggagtggctacgcttcgcgtgaagaacgccacggctcgcgatggcggtcattacaccctgcttgccgagaatctgcagggctgcgtggtttcatccgccgtgttggccgtggaacccgctgcggaaaccgcctacgaaccgaagcccgtggacgtaatggccgagcaattggaggccggcaaagcattgccgccagcctttgtgaaggctttcggagatcgcgagattaccgagggtcgcatgaccaggtttgattgccgcgttactggcaatccttaccccgaggtcttttggcttatcaacggccggcaagtgcgcgacgatgcctcgcacaagattctagtcaacgaatcgggcagccattcgctgatgatcaccaatgtgacccgattggatgccggagctgtccaatgtctggctcgcaacaaggccggtgaagtggccatcgaggcacagttgaacgtgttggaaaaggaacaagttgtcgcaccacaatttgttcaacgttttagcaccatgactgtgcgcgaaggcgaaccgatcaccatgagtgccaatgccattggaactccgcagccacgtatcacctggcagaaggacggcgtccagatctcgtccaccgccgagcgctttgtgggcatcgacggaggagccacctgcctggaaattccacgcgtcactgccaacgacgctggatggtaccagtgcaccgcacagaacatcgctggatccacggccaatagggccaggctgtatgtcgaggttcccagggaacaaccaagttacgagcagcgtcgtctcaatctcccgagaccaacgaaagtcatagagccagaacccattcctggccctgaaatcatctaccttcgccatgtggagcgcgccaagccccatctgcgccctggtgaggaggatcgcgtctatccaccgcctcagttcatcatcccgctgcagaatgtgcagcagaccgaaggtggccgtgttcacatggaggcccgcatcgaaccagttggcgatccgaccatggtcgtcgaatggtacctcaatggacgtccgctggcagccagtgcccgcgccacatccgttttcaagttcggctttatcgctctggatcttctgagcattatgggtcacgactccggcgagtatatgtgccgcgtgaccaacgccagcggagtggctgaatctcgcgctattctgtccgttgtgcagcgcccctccattgaacaatcttcgcagaaccccaacagtctgcagtacatcaaccagttggaggactactcgcgctaccagcgcacagagagcatcgatgagcagctcaaccaggcgcctcaattcatccgcccactccgcgatctcggcgaattcgaggagggcaagaacgtgcactttgaggctcaggttacacctgtgaatgatccctccatgagagtggaatggtacaaggacggactacccatcacggctagctcccgcatcactgccatcttcaacttcggctatgtctccctgaacatcttgcacctgagagccgaggatgctggcacctacaccgtgcgggcagtgaaccgcattggagaagccatcagtcagtcctctattcgtgtccactcacgttcccaagtaactgctgatctgggtatacccgagcagcagcgatacatcgaaaaggtggaggaactggaggattaccgaaagtcccagcagcgtcgtcatgtccaagaggctgccgaggctattgccccgccccaattcaagacaccgatccaaaaccagttggatctgcgcgagcacgcgcatgcgcacttcgaggcaagacttgaacccgttggagattcaaccatgcgcgtcgagtggctgaaggatggacagcctctggaagccagttccaggatcaccacctaccataactttggctacgtggcactgaccatcaagcagctgaccatctatgacgccggcacctacacctgccgcgcctacaatgcgatgggtcaggataccaccgtggctcagcttacggttatctccaagaacgaaatcgtttcggagtcgcaacacccaggtggtctgcaaaagatccagcatctcgaggactcgtcgcgctacggacgtcgcgaggaggaggagacctacatcacccaggctccccgtttccttggccccctcaagggaacaaccaaaatcctcgaaggccagcgcgctcactttgaggcccgtgttgagccccagagtgatttgggtctggtgatcgagtggtaccacaacggtcgctccatcacagccgctaatcgcatccagacatactacgatttcggttatgtcgccctggacatttcccaggtgcgcgctgaagatgccggcgtctacctcgtggtggctaggaacaagctaggtgaagctcagcagcaagcaacgatgatagtggaaactcgttccagtatcgacacatctagcatgcaccgcggtctgtacgagaagactcaaaacttggaaaacaagccgttcgtggagcctcagtatgacatcgaagagatctcgaagtccaagccagtgtttgtgacaccactgagtgatccaaagcctatccacgatggcaagaacatccatctggagtgccgccttgaaccgatgggcgatcccaccatgcgcgtcgagtggttccacaacggtcgccccgttactgtgggttcccgattccgcacttactacgactttggtttcgtagctttggatattatcaaggccacggccgccgattctggcgaatacactgtgagggccaccaaccatttgggtactgcccacacttcagcctgcgtgcgtgtaatcgaccacacggacgttgtgactgagactcagaacgaacaatcgctggagcagattcaattgctggaggactctaggcgccgccatcaccaggaggaggatattaccatcatgcaagcgccccagtttaccaggggcctgcacaacattgaaactattgagggtaccaacgtgcacttggagtgccgccttcagcccgtgggagatcctagtatgcgcatcgagtggttcgtaaatggaaagcctgttaagacaggacatcgattccgtccagcgtacgaattcgattatgtggctttggacctgcttggctgctacgccatcgattcgggcgtctacacctgccaggccaggaaccaattgggtgaagccgtaacctcctgttccgtgcgaattatcgctaagaatgatttgattttggagacccaaaacgagtcgggtcttcagaaaatccaatacttgggggactcgacacgccatcgccgcagcgagttcgtcgacgaggttgttaacattcgtccacgattccttacccatcccaaaagcttgaccaacacccgagagggtggtcacgctcacttcgagtgcaagatcgagccggtgactgacccgaacctcaaagtggagtggtttaagaacggacgtcccatcactgtgggtcaccgcttccgtcccattcatgacttcggttatgtggccttggatattgtccatttgattgcggaggactcgggtgtctacacttgcagggccgttaacctgattggctctgacgaaacccaagtggaactgcagtgccgcagtggtgagcagattgttactgtcacccagaacgaggccggtcttgagcagatccattacctggaggatcgttcgcgctatacccgacgtgaggaaatcgatgaaagtaccaagcaggctccggtgttcactacatcactgaaaaatgttgagatcaaggagaaccagagggcccactttgaatgccgtctgattcctgtttctgatccctcaatgcgtgtggaatggtaccataacaatcttccacttaagtctggttcacgtttcactgagaccaataacttcggctttgtggccttggatattatgtccactctgcccgaagatgccggaacttatacatgccgcgcctataacgctgtgggtgaggccattacctctgctgtagctgttgtgcacacaaagaagtccatctacctggagtcccagcatgaaacagctctgccacgtctgcagcatttggaggatggctccaagcgtcagcgcatcagcgttcaggacgaattcgtgtcccaggcacctgtcttcaccatgccggtaagggatgtgcgtgtggctgaaaaccaagctgtgcactttgaggctcgcttgattccagtgggagatccgaaattaacggttgagtggttgcgaaacgggcaacctattgaagcctccaaccgcactaccaccatgcatgattttggttatgtggctctcaacatgaagtacgtgaatcccgaagactctggaacctacacctgtcgggccgtcaacgagttgggtcaggcggttacctctgcctcgctcattgtgcaatctaagacctccattcaactggagacccagcacgaagccgccatgcacaagatccatcagttggaggatcacagcaggtaccagcgcagggaggaggaggagtacacggtgaccaccgccccggtatttgttactaagcttattggacccagcaacctagttgagggtcaaagcgcccactacgagtgccgcattgaaccctacccagatcccaacctcaaggtggagtggttccataatggcaagccacttagcactggtcatcgcttccgcaccacgtacgactttggatttgcggccttagacatcctcactgtctatgctgaggacagcggcgagtacacgtgccgagtcacaaacaaccacggtgaagccatcaactcgattgtgctcaacgtcacctcacgctcttccatcattcacgagactcagcacgaggaggctctgactaagatccagcatctggaagatacttcgcgattccagaggaaaacggacgaggaacagttccatgccgagcgtcctcagttcggccgacctctgcgtaatgccaaggtcaacgagggagctcccgtccacctagaggccacattaattcctgtgaatgatcctaccatgaaggtggaatggtactgcaacggtaggcccatacagactggtcaccgcttcaagaccacctacgattttggcttcgtggcattagatattctgtatgcccatgccgaagacaccggcacctacatgtgcaaggccaagaacgctattggagaagctgtcacgacttgtgctgtaaacgtaacagcaaacaagacactcgatctggacaccttggatgctcagcgtttagagaagatccgccaactggaaacatatgcgcctcctcctaagcccgtcgtggaggagaagggccagaaacccattttcctcacaccgctaagcaacttagaacacttgaaggagggcgagcacgcccacttggagtgccgagtggaaccgatcaacgaccccaacctaaagattgaatggttctgcaatggcaagcagctgcccaccggtcaccgttaccgtactacccacgactttggttacgtcgctttggacattctttacgtctatggcgaggataccggcacatacatttgtaaggccaccaatcagctgggtgaggctgtaaacacctgcaatgtgcgcgtgttaaaccgacgcagcatgatcctggatacccagcatcccgatgctctggaaaagattcaaaagctggagtctaaggtgccgaatgcacgtaccgaggttggagacgctccgatcagtccacctcatttcaccgccgaacttcgcggttccactgagatctacgagggtcagaccgctcacttcgaggcccaggtcgctccagttcacgatcctaacttgcgcattgagttctatcacaatggcaagcctctgccgtctgcttctcgcttccacatcaccttcgattttggatacgtgtctttggatattactcatgctgtggccgaggacgccggagaatattctgtgcgtgctgttaacgctttgggccaagctgtgtcctccacgaatctgcgcgtcattccgcgtggcaccatcatttcggacacccagcatcccgagggactggagaagattcgcaagctggaatcgactgcgccgcatcagcgccaggagcctgaaacccccggcactcgccagcgcccagtgttcacccaacctcttcagaacatcgacagaatcaatgaacatcagacggctcacttcgaggcgcgcttgattccagtgggagatcccaatctgaaggtcgagtggtaccgcaacgaaaagatcattgaagatagctcccgtatcaccaagcagcacgatttcggttttgtgtccctcgacatctcacatattcgcaaggaggatgagggcgtgtacatgtgccgcgccgtcaatccactgggtgaggcagtaaccaccgcctctatgcgcgtggtatctgaggccagcatccaaatggatactcaacatccggacagtatcagtcgcatccatcaactggagaaaccactggcaccacgccccactgaaccagagcgcctgtttgagaagcccatcttcactcaactgctcactggaccttcggagttgtgggagggtactcatgcacacttcgaagcacgagtcgtgcctgtgggagatccttctctgaagtttgagtggtttatcaacggcgtggagcttcaaatgggctctcgcctgcgcaccacacacgactttggattcgtcaccctggacattactgcagtggtaccagaggatgccggtgtctacatgtgccgtgcttacaacgccgccggtgaggctgtatcttctactgccatgaaggttaagaccaagtcgaatattgatggtcagcctttgattccggagtcttgggaggctattcgactgaaggaggctgccatgaatcgtgtaccagagatgtttgttgactcgacaccccaacaagctccggtcttcaccacgcatctgcagagctacgacaagctgcatgagggtcagcacgtccttttggaagcccaagttgaaccccgcgcggatcccaacctccgcattgagtggtttaagaatggtatttctctaaccactggctcccgaattcgcagtacctttgactttggactagttacactgtccatcaacggattgcgtgctgatgactccgctatttacacctgcaaggctactaaccaggttggcgaggctgtctcaacctcatctcttaagatcgaagatcgccattggcttcaggccgagtctctgcacccagattcgttgcctcgcattggagagcttgaggcgcccaaggagggacgaccagaggctccagagcccacttatgagactcctgtgtttattactcatcttaacaacattgagtgcaaggagagcgacaatgtacgcttcgagtgcaacgtggaaccggctcgtgatcctaccatgtccatcgagtggttctacaatggacaaccgctgcaggccgctgccaaatttaagtccatctacgactttggctactgcgctttggatctgaccaactcttatgctgagaacagcggtgtttacacctgtaaagctactaacagcaagggatctgcgactacctctggcactcttaagtgcactggtggcaagaccatgttcctagacacccagcatccgcagggggaggctggtcttgaggctgtgcaggaaaccgaggaggagctggccaatcgctacaccagcaaaacgacaaagcccgagacacagtatccaccaccagtatggacgaagccactgcaggccgagttccatttgtcggaggcccaacccattcatttggaagccaacgtggagcccaaggaggatcccaacctgtttatagagtggtactttaatggcaaaatgctgaaccatggttctcgcttcaagatgaccagtgaatttggtttcgttaccatggatatgatcgaggtatatgcgcgcgatcagggtatctacacttgcaaagcgtacaacaaggctggagaggcctttacctccaccaccatcttctgttcgagcaaggagaacatcatcgagtcaactcagcacccgaagggagctgaaggccttgagcaaatccaggaccttgaagactccctgcgcaaggacggctctaagccagaacagccagatcttggcatcccaccacgcttcaccactgaattcgttaatattgcagacatcggggagggtgaattggctcactttgaggccaatctcattcctgttggtgaccagagcatggtcatagaatggttctacaacggcaaggttttggaggccagccatcgtgtgcgtaccatctacgcttttggcacggttgccctggaggttcttggcaccaagatcgaagacaccggcacctacacttgccgcgccaccaacaagcatggaactgctgaaataagctgcaatctggagtgcgtggacaagccgaggggccagaagccgcgcttcacgtcccacattcagccgctggagggcctgaaggacggacagtccgctcacttcgagtgcactctgattccagtcaacgatccggatctgaaggtggagtggtatcacaatggcaaactgatgcgtcactccaaccgcatcaagacggtttccgattttggatacgtcgttttggatatttcctatctgcaggatcatgacagtggagaatacgtttgcagagcctggaacaaatacggtgaggactttacccgtaccaccctcaattgtggaggacgtggcggagtgttctatgatagcttgcagccggattcactgcagaggattagggagcttgagtgcccacaaggacaacaggcagatacctcggctcctctggtcgctgagccacccaagttcatcacccagatcgttgatgtaactaagctggtggagggacagtcggctcatttcgaggcacgattgactccgatcaccgatcctgatttggtggtggaatggtactttaacggcaagaaactaccccatggtcaccgcttccgcaccttccacgacttcggtattgttattctggacattctgtactgctacgaagagaactctggtgtatacgaggccagggctcgtaacaagtatggagaggatgttactagggcttcgctcaagtgtgcctcaaagtcgagcctcattttggactcccagttgcctcgaggaatggaaggtggcttggagaagatcgccaacctggagtacagcatggtccgcactcgcgaagagaccaccgaagagaccaagggcaaggctcccgtctttactgtaccactggaaaatatcgaaaatctgcgtgagggtgaaaatgcccactttgaagctaggattaccccggccgatgatcccaaactgaaggtcgagtggtactggaacggtcgtccattgaaggccggttctcgtttccgcactttctgcgactttggctttgtcatcctggagatttctcctgtgtatcctgaggactccggcgagtactcttgccgcgcaatcaacgagtatggtgaggcagtgaccacggccaccatgaagatccagggtaagcgcagcatcttcatggattctcagctgcccaagggcatggagggaactatcgatcgcatcgccgaactggagggcttgggctcccgcggcaccgggttcgtaccagatgatgatactggcaagccaccggagtttatcacctctcccttcgatatggttatcggcgagaacgctctggctcacttcgaatgccgcctgcagccgattaatgacccatcgatgcgtgtggattggttccacaatggcaaggccttgtgggctggttctcgtatcaagaccatcaatgattttggcttcgtaatcctcgaaattgctggttgctatcagcgtgattcgggattgtacacttgcaaggccacgaacaagcatggtgaggccacggtctcttgcaaattgcaggttaagggtcgccaaggcatcgttatggagccccagttaccctccaacttccgcaccggcactgagagtctgcagaaacttgaggagaccatgcataagcgtgaggagcttgtgactgaagacgagcagcccaatcccccgaaattcaccgaggaaataaaggacaatttggatgttcctgagggtggtccaattcactttgactgccgtgtggaccctgtcggcgatccaaccatgcgcattgagtggttctataatggtcatgttatggctactggatctagggtccatcagctcaacgactttggctttattgctttggatgtggactacatctatgccagggattcaggcgagtatacttgccgggcaaccaacaagtggggcactgccacaactagcgcaaaggtcacttgcaagggaaagcacaatattgtgtacgagtcgcagttgccagagggcatgacctccgaaaagttgaaggagctggagcgaggacgcatcccagaagcgccgaaggtggttgaggaggtgtttggaccaccaaagttcaccacacagatcacttctgtgactgtcgatgaagccgaggccgttcgctttgaatgccaggtggaacccaagacggatcccagcctgcgcgtcgaatggtaccgcaatggcaagcccttgccttctggaaatcgttatagaaatattttcgacatgggctttgtttccctggatattctgtatgtctatggagaggactctggagagtacgtgtgccgtgccattaacaaccacggcgaggatcgcaccagagctacagtgtcttgcaagaaactccctaccatcttactccagaaccaggttcctcgcggcatgaagcgttcagatgctctaacccaaatggaagctaccatcaagaaatatacatccgaagtccatttgacagaggatgatctattcgatcctgatcgcaagcagcctcctcgctttgtcacccaaatcaaagagcagcttactcttaccgagatggccgtcaccaaattcgaatgccaattggctcccgtgggagatcctaacatgaaagtcgagtggttcttcaatggcaaaccatttctgcacaagaaccgcttccagcccatttacgattttggttatgtggcaatgaactttggctgggtttatcccgaagacagcggagagtacgtgtgccgtgccaccaacttgtatggcaaggacgagactcgtgccatcattaaggtttctggaaagccaggaattgtctatgactcccagctgcccgctcacatgcagagcattgaccgcatccgcgaaatggaagcctcatggcaagtggtgcccgatgaggttgatcccgatgccaagcccagaaccaagccagtgtttgtcagcaaactggagccccagactgtggaggagggtgacccagctagattctgtgttcgtgtcaccggccacccacgtccgagggttatgtggcttatcaacggtcaaactgtcgttcatggctctcgttacaagctgacaaacgatggtatgttccatttggatgtcccgaagacacgtcagtacgacactggcaaggtagaggtgattgctcgaaactctgtgggcgaatcgattgccaccactgaactgaaggttgttgcacgatcggacgattatcgcaatgtgctgaagaattcgccacgtccctggtacgattacgaactagctgcctatcagaaggagcgccaggagaacgagttggaaaaggtattcgatgagcgtaagcaggtcctttccgaacacagctcccacacgttgaagggcgtggagcacctgaagcccaagcaatacaagccacccactccggactggcagcaaaatgtcaaggccaagaagagcgaggactactacaacaagctgcagactctggaaactgaacagctgctgaaggagaccaacctgcgaagggatactcatcagtacgccattcccggagagaaggtagtgagcagttctcaggccaagggaatggcccagtcttacgaagaaaatcttcaagagaaaacgagcaccactgaagtgcaggctgctccacccaagggtactgcccaaccatccgaatcatccgtccatggtcgcgaagttcacatgaacaagcagcaacaggtgcagaaggagatccagggtgaccttgagattacccgcaagataaccgccaccgaaacaaccgaggttgagcataagggaaccattcaggagcgtgtcgttcagggacccgtcaaaccggccaaggctccggtcttcaccaaaaagatccagccatgccgcgtctttgagaacgagcaggccaaatttgaagtggaattcgagggagagcccaatcctacggttaaatggtaccgtgagagtttccccatccaaaactctccggatctgcagatccacaccttcagcggcaagtcaattctgatcatccgccaagtgttcgtcgaggactcggcagtcttctcgtgtgtggccgaaaaccgtggaggaacagcaaagtgcagtgccaatcttgttgtcgaggaacgtcgtcgcgccggaaagggtggcattcagccacctagtttcgtgaccaccatacagagcactactgtggccaccggcagttggctcgcttcgatgccaaggttacaggcactcgcccactggatgtgtacttggcttaagaacggcatgaagattcagccgagcatcaagttcaagatgctggaggaggacagtgttcacactctacttatcatcgagccgttcgccgaggattccggtcgctatgagtgtgtggccgtcaatgccgctggagaggcccgctgcgatggtgactgcatcgtgcaatcgcccagcaaaccggagaaacctacgactccgggcagcgagaaggcgccacatattgtggagcagcttaagagccagaccgtggaggagggaagcaaggttatcttccgctgtcgagtggatggcaagcccactcccaccgcccgctggatgcgtggcgagaactttgtgaagccatcacgctacttccagatgagccggcaaggcgagtactaccagttggtcatctcggaggccttccccgaggacgagggtacctacaagtgcgtggctgagaacaaactgggcagcattcagaccagcgctcagctcaaggttcgaccaatcgagaaccttgacgccccgcccactatcacagccctcaaggatgtctctgtcaccgagggcatgcccgctcagtttaagacgacggtgaccggcaaagtgaaagccaccagcgtccaatggttccgcgagggtcagctgattcccgaaacaccggacttccagatgatcttcgatggcaatagcgctgtactcctgattggcaccacctacgaggaggattcgggcatctttactgtgcgcgtaacctcgtccaccggccaggttgaatcctcagccaaactgactgttaaaagtaaggattaa

SEQ ID NO: 193 - protein, 4796 aa, Drosophila melanogaster
MQRQNPNPYQQQNQQHQQVQQFSSQEYSHSSQEQHQEQRISRTEQHVQRSQVTTQRQVQQHHGGSIGGAYVPPSLTHVYAQGDISPPVFEQIFKNARFAQGGNALFEGRLRGNPKPFVTWTRKGAPLLESQKFRMSYNEATGDVSLLINQIGPGDEGEYTCTARNQYGEAICSVYIQPEGAPMPALQPIQNLEKNIYSNGYSYTSIEEEFRVDTFEYRLLREVSFREAITRRSGYEQDSQLSQELDRNQGPAQAPQISQKPRSSKLIEGSDAVFTARVGSNPKPRLTWFHNGQRLVASQKYEISYSSGVATLRVKNATARDGGHYTLLAENLQGCVVSSAVLAVEPAAETAYEPKPVDVMAEQLEAGKALPPAFVKAFGDREITEGRMTRFDCRVTGNPYPEVFWLINGRQVRDDASHKILVNESGSHSLMITNVTRLDAGAVQCLARNKAGEVAIEAQLNVLEKEQVVAPQFVQRFSTMTVREGEPITMSANAIGTPQPRITWQKDGVQISSTAERFVGIDGGATCLEIPRVTANDAGWYQCTAQNIAGSTANRARLYVEVPREQPSYEQRRLNLPRPTKVIEPEPIPGPEIIYLRHVERAKPHLRPGEEDRVYPPPQFIIPLQNVQQTEGGRVHMEARIEPVGDPTMVVEWYLNGRPLAASARATSVFKFGFIALDLLSIMGHDSGEYMCRVTNASGVAESRAILSVVQRPSIEQSSQNPNSLQYINQLEDYSRYQRTESIDEQLNQAPQFIRPLRDLGEFEEGKNVHFEAQVTPVNDPSMRVEWYKDGLPITASSRITAIFNFGYVSLNILHLRAEDAGTYTVRAVNRIGEAISQSSIRVHSRSQVTADLGIPEQQRYIEKVEELEDYRKSQQRRHVQEAAEAIAPPQFKTPIQNQLDLREHAHAHFEARLEPVGDSTMRVEWLKDGQPLEASSRITTYHNFGYVALTIKQLTIYDAGTYTCRAYNAMGQDTTVAQLTVISKNEIVSESQHPGGLQKIQHLEDSSRYGRREEEETYITQAPRFLGPLKGTTKILEGQRAHFEARVEPQSDLGLVIEWYHNGRSITAANRIQTYYDFGYVALDISQVRAEDAGVYLVVARNKLGEAQQQATMIVETRSSIDTSSMHRGLYEKTQNLENKPFVEPQYDIEEISKSKPVFVTPLSDPKPIHDGKNIHLECRLEPMGDPTMRVEWFHNGRPVTVGSRFRTYYDFGFVALDIIKATAADSGEYTVRATNHLGTAHTSACVRVIDHTDVVTETQNEQSLEQIQLLEDSRRRHHQEEDITIMQAPQFTRGLHNIETIEGTNVHLECRLQPVGDPSMRIEWFVNGKPVKTGHRFRPAYEFDYVALDLLGCYAIDSGVYTCQARNQLGEAVTSCSVRIIAKNDLILETQNESGLQKIQYLGDSTRHRRSEFVDEVVNIRPRFLTHPKSLTNTREGGHAHFECKIEPVTDPNLKVEWFKNGRPITVGHRFRPIHDFGYVALDIVHLIAEDSGVYTCRAVNLIGSDETQVELQCRSGEQIVTVTQNEAGLEQIHYLEDRSRYTRREEIDESTKQAPVFTTSLKNVEIKENQRAHFECRLIPVSDPSMRVEWYHNNLPLKSGSRFTETNNFGFVALDIMSTLPEDAGTYTCRAYNAVGEAITSAVAVVHTKKSIYLESQHETALPRLQHLEDGSKRQRISVQDEFVSQAPVFTMPVRDVRVAENQAVHFEARLIPVGDPKLTVEWLRNGQPIEASNRTTTMHDFGYVALNMKYVNPEDSGTYTCRAVNELGQAVTSASLIVQSKTSIQLETQHEAAMHKIHQLEDHSRYQRREEEEYTVTTAPVFVTKLIGPSNLVEGQSAHYECRIEPYPDPNLKVEWFHNGKPLSTGHRFRTTYDFGFAALDILTVYAEDSGEYTCRVTNNHGEAINSIVLNVTSRSSIIHETQHEEALTKIQHLEDTSRFQRKTDEEQFHAERPQFGRPLRNAKVNEGAPVHLEATLIPVNDPTMKVEWYCNGRPIQTGHRFKTTYDFGFVALDILYAHAEDTGTYMCKAKNAIGEAVTTCAVNVTANKTLDLDTLDAQRLEKIRQLETYAPPPKPVVEEKGQKPIFLTPLSNLEHLKEGEHAHLECRVEPINDPNLKIEWFCNGKQLPTGHRYRTTHDFGYVALDILYVYGEDTGTYICKATNQLGEAVNTCNVRVLNRRSMILDTQHPDALEKIQKLESKVPNARTEVGDAPISPPHFTAELRGSTEIYEGQTAHFEAQVAPVHDPNLRIEFYHNGKPLPSASRFHITFDFGYVSLDITHAVAEDAGEYSVRAVNALGQAVSSTNLRVIPRGTIISDTQHPEGLEKIRKLESTAPHQRQEPETPGTRQRPVFTQPLQNIDRINEHQTAHFEARLIPVGDPNLKVEWYRNEKIIEDSSRITKQHDFGFVSLDISHIRKEDEGVYMCRAVNPLGEAVTTASMRVVSEASIQMDTQHPDSISRIHQLEKPLAPRPTEPERLFEKPIFTQLLTGPSELWEGTHAHFEARVVPVGDPSLKFEWFINGVELQMGSRLRTTHDFGFVTLDITAVVPEDAGVYMCRAYNAAGEAVSSTAMKVKTKSNIDGQPLIPESWEAIRLKEAAMNRVPEMFVDSTPQQAPVFTTHLQSYDKLHEGQHVLLEAQVEPRADPNLRIEWFKNGISLTTGSRIRSTFDFGLVTLSINGLRADDSAIYTCKATNQVGEAVSTSSLKIEDRHWLQAESLHPDSLPRIGELEAPKEGRPEAPEPTYETPVFITHLNNIECKESDNVRFECNVEPARDPTMSIEWFYNGQPLQAAAKFKSIYDFGYCALDLTNSYAENSGVYTCKATNSKGSATTSGTLKCTGGKTMFLDTQHPQGEAGLEAVQETEEELANRYTSKTTKPETQYPPPVWTKPLQAEFHLSEAQPIHLEANVEPKEDPNLFIEWYFNGKMLNHGSRFKMTSEFGFVTMDMIEVYARDQGIYTCKAYNKAGEAFTSTTIFCSSKENIIESTQHPKGAEGLEQIQDLEDSLRKDGSKPEQPDLGIPPRFTTEFVNIADIGEGELAHFEANLIPVGDQSMVIEWFYNGKVLEASHRVRTIYAFGTVALEVLGTKIEDTGTYTCRATNKHGTAEISCNLECVDKPRGQKPRFTSHIQPLEGLKDGQSAHFECTLIPVNDPDLKVEWYHNGKLMRHSNRIKTVSDFGYVVLDISYLQDHDSGEYVCRAWNKYGEDFTRTTLNCGGRGGVFYDSLQPDSLQRIRELECPQGQQADTSAPLVAEPPKFITQIVDVTKLVEGQSAHFEARLTPITDPDLVVEWYFNGKKLPHGHRFRTFHDFGIVILDILYCYEENSGVYEARARNKYGEDVTRASLKCASKSSLILDSQLPRGMEGGLEKIANLEYSMVRTREETTEETKGKAPVFTVPLENIENLREGENAHFEARITPADDPKLKVEWYWNGRPLKAGSRFRTFCDFGFVILEISPVYPEDSGEYSCRAINEYGEAVTTATMKIQGKRSIFMDSQLPKGMEGTIDRIAELEGLGSRGTGFVPDDDTGKPPEFITSPFDMVIGENALAHFECRLQPINDPSMRVDWFHNGKALWAGSRIKTINDFGFVILEIAGCYQRDSGLYTCKATNKHGEATVSCKLQVKGRQGIVMEPQLPSNFRTGTESLQKLEETMHKREELVTEDEQPNPPKFTEEIKDNLDVPEGGPIHFDCRVDPVGDPTMRIEWFYNGHVMATGSRVHQLNDFGFIALDVDYIYARDSGEYTCRATNKWGTATTSAKVTCKGKHNIVYESQLPEGMTSEKLKELERGRIPEAPKVVEEVFGPPKFTTQITSVTVDEAEAVRFECQVEPKTDPSLRVEWYRNGKPLPSGNRYRNIFDMGFVSLDILYVYGEDSGEYVCRAINNHGEDRTRATVSCKKLPTILLQNQVPRGMKRSDALTQMEATIKKYTSEVHLTEDDLFDPDRKQPPRFVTQIKEQLTLTEMAVTKFECQLAPVGDPNMKVEWFFNGKPFLHKNRFQPIYDFGYVAMNFGWVYPEDSGEYVCRATNLYGKDETRAIIKVSGKPGIVYDSQLPAHMQSIDRIREMEASWQVVPDEVDPDAKPRTKPVFVSKLEPQTVEEGDPARFCVRVTGHPRPRVMWLINGQTVVHGSRYKLTNDGMFHLDVPKTRQYDTGKVEVIARNSVGESIATTELKVVARSDDYRNVLKNSPRPWYDYELAAYQKERQENELEKVFDERKQVLSEHSSHTLKGVEHLKPKQYKPPTPDWQQNVKAKKSEDYYNKLQTLETEQLLKETNLRRDTHQYAIPGEKVVSSSQAKGMAQSYEENLQEKTSTTEVQAAPPKGTAQPSESSVHGREVHMNKQQQVQKEIQGDLEITRKITATETTEVEHKGTIQERVVQGPVKPAKAPVFTKKIQPCRVFENEQAKFEVEFEGEPNPTVKWYRESFPIQNSPDLQIHTFSGKSILIIRQVFVEDSAVFSCVAENRGGTAKCSANLVVEERRRAGKGGIQPPSFVTTIQSTTVATGSWLASMPRLQALAHWMCTWLKNGMKIQPSIKFKMLEEDSVHTLLIIEPFAEDSGRYECVAVNAAGEARCDGDCIVQSPSKPEKPTTPGSEKAPHIVEQLKSQTVEEGSKVIFRCRVDGKPTPTARWMRGENFVKPSRYFQMSRQGEYYQLVISEAFPEDEGTYKCVAENKLGSIQTSAQLKVRPIENLDAPPTITALKDVSVTEGMPAQFKTTVTGKVKATSVQWFREGQLIPETPDFQMIFDGNSAVLLIGTTYEEDSGIFTVRVTSSTGQVESSAKLTVKSKD

SEQ ID NO: 194 - DNA, 1866 bp, Drosophila melanogaster
  CDS (1)..(1866): CT6007
atggcgctgaccagcgcggtgattggatttgcctactaccaaaagcagcagttctatcctgcggtggtctacatcaccaaatcgaacgcctccatgggggtcatatacatacaattctttgtaattgtcttcatgttcggcaagctgctaagcaagatcttcctgggcactctgcgtgccgcagagtttgagcatctgctggagcgcttttggtatgcccttacggagacctgcttggcctttaccgtattccgggatgacttcaatccgcgctttgtggccttgttcacggtgcttctatttctcaaatcattccattggctagcagaggagcgggtggactttatggagcgttcccccgtgctcggctggcttttccacattcgcgtgggcagtctgctcacagtgctaggcatcctagactacgttctgttgatccatgcctataactccactttggtgcgtggtcccaccgtgcagttggtctttggctttgaatacgccatccttctgaccgtaatagccagcacggccatcaagtatgtgcttcacgccgcggaaatgcgcacggacacgccctgggagaacaaggccgtgttcctgctatatacagagctggtcattggacttattaaggtggtcctgtacatactgtttgtggtgatcatggctaaaatatacgcgctgcccatgttcgtattcaggcctatgttctttaccatacgcaacttccgtaaggccctaaatgacgtgattatgtcccggcgtgccattcgcaacatgaataccctgtatcccgacgccacgcctgaggagctgcgccagtcagacaacatctgcatcatttgtcgcgaggacatggtcaatcactcaaagaaactgccctgcggccacatcttccataccacatgcctgcgctcgtggtttcagcgccagcagacctgtccaacctgccgtttgaacatccttcgaactccaaccgtgaactccacagcgatgccacggcaaggcgatgaggctgtggccgcagctgctggaaatcccattccggctgcagcaggtgttcaaccggctggtggtgtgcctcctccagctccaactgccgtagttgacggcaatcaggcaagagccgacgtcaatgtagccggaggtcaagccttgccgccaaactttgcggatctcttcggtgatgccagcggcttgcccaatggattgcctaacctggctggtttgcagatccctcctccgccagtaatgcccatgatttcgccttttatgataccaccccacttcggctacctcacgcctctgccgcctccgccgattccacaggacctgaccaattttaccgacgaagaactgcgggccatggagggccttcaacgtgatcatattgtgcagcgtctaaagatcactttacagttgctgcaaaacataaacctaatgctggattccgcggggataatgatgtcccagtaccaaagtttgtctgcgcgcctgcagcttactgcagtgacgccagccaccgcggtcaacggatctgctgattctagcgtctacgacatgcccagtacctcggccacggccatggctcagttggagactcaccaggttacccccacagcagcagccagctcagcgtctccgacgatgcctgcagagaaggtaaccattgaggatttgggagcggacgcagacgaggatgatataccatcgacggccacggaggcagttagcattcccaactccgatgccgactttgaggagaactcctcggagctgggcgaactaaggaagcgccgtttgaagttccttgaagagcggaacaagtctgcagccactaatgaacgcacgacagcggaataa

SEQ ID NO: 195 - protein, 621 aa, Drosophila melanogaster
MALTSAVIGFAYYQKQQFYPAVVYITKSNASMGVIYIQFFVIVFMFGKLLSKIFLGTLRAAEFEHLLERFWYALTETCLAFTVFRDDFNPRFVALFTVLLFLKSFHWLAEERVDFMERSPVLGWLFHIRVGSLLTVLGILDYVLLIHAYNSTLVRGPTVQLVFGFEYAILLTVIASTAIKYVLHAAEMRTDTPWENKAVFLLYTELVIGLIKVVLYILFVVIMAKIYALPMFVFRPMFFTIRNFRKALNDVIMSRRAIRNMNTLYPDATPEELRQSDNICIICREDMVNHSKKLPCGHIFHTTCLRSWFQRQQTCPTCRLNILRTPTVNSTAMPRQGDEAVAAAAGNPIPAAAGVQPAGGVPPPAPTAVVDGNQARADVNVAGGQALPPNFADLFGDASGLPNGLPNLAGLQIPPPPVMPMISPFMIPPHFGYLTPLPPPPIPQDLTNFTDEELRAMEGLQRDHIVQRLKITLQLLQNINLMLDSAGIMMSQYQSLSARLQLTAVTPATAVNGSADSSVYDMPSTSATAMAQLETHQVTPTAAASSASPTMPAEKVTIEDLGADADEDDIPSTATEAVSIPNSDADFEENSSELGELRKRRLKFLEERNKSAATNERTTAE

SEQ ID NO: 196 - DNA, 1464 bp, Drosophila melanogaster
  CDS (1)..(1464): CT5951
atggcgatgaacagtgggacgcaaacgaatgcgctgacatcatcctttaccatgaagaaaaaggatgcggccgcggaaaaggagaacctatggtcggcgatattgaatgaagtacaaacacagggcagcacaaaacttccatcaaacaaatctgtactagtattaggcgacaatgccaccggaaagacgacactcattgccaaactgcagggcgtcgaggatccgaagaagggttccggcctggagtatgcctacattgatgtcaaggatgagtacagagacgacatgacgcgtttaggcgtttgggtcctggacggtgatccaggacacacaaacctgctacactatgcgctcaacgaaacgaactatgcacacacactcgtcatcctcaccgtttcgatgacgcagccgtggggctggctggagcagctaaaccattggatcaaggtcctcggccagcacatcgatagcctgcagctggacgccaaagagaaggaggcggcccgccagcgactgaccaccacgtggcagagctactgtgaggtgggcgacgatctggatccaggctcccccgtcaagcggacgatgcgcaacaactcgatcgacgaggatgacctgctgccgctgacggaggatgcactaattacaaatctgggcctcgacatcgttgttgtggtcacaaagacggactacatgaccacgctagagaaggagtacgagtatcgtgacgagcactttgacttcatccagcagtggatacgtaacttctgcctgcggcatggcacttcgctcttctacacgagcgtcaaggaagacaagaactgtgatgtcctctacaagtatctgacgcatcgaatttatggtctaccattccgtacgccagcgctagtcgttgagaaggatgcggtactcattccggctggctgggatagcctgaagaagattagtattttatacgagaatatgcatggagtcaaggccgagaatccctacacagacattatcaaatcgccaccaactagaaaggcggtttccaatcgcgaggcggaagtgcagacggaggatgagcaggcattcctggcacgccagcaggagatcctaaagcagggcgaccaggtgcgcggtgagtcaccactgcgatcgcagggcgtaggcagcaataagagcggaccccgaacgcccggcaccaccggacagagttcgcccaaaaagccagcaacgcccggcgccgaaggcgttctagccaacttctttaactcgctgctgcacaaaaagtcgggcagtccgggtaccggaggtcccggcggagcgggtaatccggcgggtccgggtcgcactgccaacggtacggatgcagtaatgacgcccgaaaagctggccgtgcgcacagatgcggccgccgagcttgatcgattatcgcgcagtgtgaaaaaagagattgacatgtcgcagagtgagtgttaa

SEQ ID NO: 197 - protein, 487 aa, Drosophila melanogaster
MAMNSGTQTNALTSSFTMKKKDAAAEKENLWSAILNEVQTQGSTKLPSNKSVLVLGDNATGKTTLIAKLQGVEDPKKGSGLEYAYIDVKDEYRDDMTRLGVWVLDGDPGHTNLLHYALNETNYAHTLVILTVSMTQPWGWLEQLNHWIKVLGQHIDSLQLDAKEKEAARQRLTTTWQSYCEVGDDLDPGSPVKRTMRNNSIDEDDLLPLTEDALITNLGLDIVVVVTKTDYMTTLEKEYEYRDEHFDFIQQWIRNFCLRHGTSLFYTSVKEDKNCDVLYKYLTHRIYGLPFRTPALVVEKDAVLIPAGWDSLKKISILYENMHGVKAENPYTDIIKSPPTRKAVSNREAEVQTEDEQAFLARQQEILKQGDQVRGESPLRSQGVGSNKSGPRTPGTTGQSSPKKPATPGAEGVLANFFNSLLHKKSGSPGTGGPGGAGNPAGPGRTANGTDAVMTPEKLAVRTDAAAELDRLSRSVKKEIDMSQSEC

SEQ ID NO: 198 - DNA, 2904 bp, Drosophila melanogaster
  CDS (1)..(2904): CT6352
atggtgaagaagaaaatagacaaccggatacgcgtgatgatcgagaatggggtcaagctgggccaccgaaccatgttcatcgtcatcggggacaaggcgcgcgaccaggttcccattctttacgacatcctgaccaagtcgacggtcaaggcgcgacccacggtcctgtggtgctacaagaacaaggatgaggccatctccaatcatggcaaaaagcgagcaaagaagattgctgtgggcaaagtggatgtcaatgaggcggacctgttcgattcctttcgagtggccaccaccattcacggcagatactactccgagacgcacgcagtcctcggacgaacctacggcgtgtgtgtgctccaggacttcgaggccctgacccccaatcttttggctcgaactgtggaaacggttgagggcggcggtctgatcatcctgctgctgaagacactgcagtcgctgaaacagttgtacaccatgagcatggatgtgcacaagcgattccgcacagaagcccatcagacggtgacctgtcgattcaatgagcgactcattctctccctggcggactgcaagcgctgtctggtggtcaacgatgacctcaccgtgctgccacttagctccaagaccatcaacgtggagccagtgaatcccgcaggcgccggtcgatcgcccaacgaggctagcctcaaggagctgaaggagagcctgctcacagttcaaccagcaggagctctggttaatctctgcaagacctacgatcaggccaatgccgttgcccagttcattgaggcgctggtcgacaagcaactgaagccgcccatgtccttaacagcggctcgtggtcgtggtaaatcggccgccctgggtctgtcgattgccgccgccgtcgcctttggctatgtgaacatctacgttacctcaccgcatccggagaacttaatcacgctctttgaatttgtgctcaagggcttcgatgccttggagtaccaggagcatgctgactacaccattatacgctccaccaatgccgactacaaaaaggcgataataagaataaatattacgagaagcagcaggcagaccattcagtacatagctcccagcgatactcatctgctgaacgcagccgatcttctgctgatcgatgaggcggctgccattcctttgccgctggtaaagaagatgatcggtccgtatttggtattcatggccagtacgataaatggatacgagggcactggcagatcgctgagcttgaagctcatttcccagctgcaaaaggataacaatgcaaggccgccactgaaactggaggaatcgattcggtatcaggagaacgacgacatagaaaagtggctgatcaacctgctgtgcttggatgccagtacggtgccgagtattagctcgggctgtcccacgccggatgcttgtgaactgtactatgtggacagggacgccctgttttcgtatcacaaggctgccgaggcctttctccatcgcctggtctccatttatgtgtcctcgcactacaagaacacaccaaacgatttgcagatgatgagcgatgccccggcgcatcatctattctgtctactgggtccggttcagcgaatggacgccctgccagagatattggtggttatccaagtggcactggagggtcagatctccgcccagagcatcagcgattccctgggcaggggcaagaaggcggcgggcgatctgattccctggaacgtagccgagcagtatggcgatcgagattttcccaagctgtgtggcgttcgcattgtgagggtagccacgcatccgaattaccagaggatgggctatggcaagcgggccattcagctgctcaaggactactatgcaaggaagcacactaatctggaggacggtccagttgccagcaaggatgctggtaaaggtatcgaggaagtggaggaggaggaacttagtctgctgaaggaacaaatccggccacgtagtcgtatacccacacttctgcagcgcttgcacgaacgtgtcccggaacacgtggactatattggcacatcctatggcctcaccaccgagctgctgaagttctggaagaacgccggctttgtgcccgtctatttgagccagaaatctaacgaactgaccgccgagcatagctgcattatgctgcacacgcccaatgccacgccctggctgggcctgtactaccaggacttccgcaggagagtcctcaagttgatgggaaagacgttcagggaattcgagacgaaactctgtttggccttgctgaagaacaagtccgtggacacggaaggtagtgcactgaaagtactcgataagccaatgctggatgtttacttcttgccgcacgatctgcagcgcttggagagctacgcccgccagcagtccgagtttcgtctaatcatcgatctgctcacggacattgcccagctgtattttcagggcaggatcgatggtctgcagcttgacctggtgcagcagggcatccttttggctctgggcgtgcagggcaagactgtggatgcgttgggtctggagctgaatatgccgggtaaccagttgttggcgaaatttttcgatgccatgaaacggtgcaatcagtgcttccggtcggtactggaggagcatatcgaaggcggcatgctgcgggaggcggatctgtccaagggcgaggaactgcaaccgctgactctgtccctcgacaaggagctggatcaaaccgctcagaagctgagcaagcagcagcgcaaggagctgaagcgcctgaaggccgagcagctggacgaattccaaatcaagggcaccgaagaggattggtccaaggcgctggaaacaaacggaacaggcggtggcagcgggctgctctccgtcaagaggtaa

SEQ ID NO: 199 - protein, 967 aa, Drosophila melanogaster
MVKKKIDNRIRVMIENGVKLGHRTMFIVIGDKARDQVPILYDILTKSTVKARPTVLWCYKNKDEAISNHGKKRAKKIAVGKVDVNEADLFDSFRVATTIHGRYYSETHAVLGRTYGVCVLQDFEALTPNLLARTVETVEGGGLIILLLKTLQSLKQLYTMSMDVHKRFRTEAHQTVTCRFNERLILSLADCKRCLVVNDDLTVLPLSSKTINVEPVNPAGAGRSPNEASLKELKESLLTVQPAGALVNLCKTYDQANAVAQFIEALVDKQLKPPMSLTAARGRGKSAALGLSIAAAVAFGYVNIYVTSPHPENLITLFEFVLKGFDALEYQEHADYTIIRSTNADYKKAIIRINITRSSRQTIQYIAPSDTHLLNAADLLLIDEAAAIPLPLVKKMIGPYLVFMASTINGYEGTGRSLSLKLISQLQKDNNARPPLKLEESIRYQENDDIEKWLINLLCLDASTVPSISSGCPTPDACELYYVDRDALFSYHKAAEAFLHRLVSIYVSSHYKNTPNDLQMMSDAPAHHLFCLLGPVQRMDALPEILVVIQVALEGQISAQSISDSLGRGKKAAGDLIPWNVAEQYGDRDFPKLCGVRIVRVATHPNYQRMGYGKRAIQLLKDYYARKHTNLEDGPVASKDAGKGIEEVEEEELSLLKEQIRPRSRIPTLLQRLHERVPEHVDYIGTSYGLTTELLKFWKNAGFVPVYLSQKSNELTAEHSCIMLHTPNATPWLGLYYQDFRRRVLKLMGKTFREFETKLCLALLKNKSVDTEGSALKVLDKPMLDVYFLPHDLQRLESYARQQSEFRLIIDLLTDIAQLYFQGRIDGLQLDLVQQGILLALGVQGKTVDALGLELNMPGNQLLAKFFDAMKRCNQCFRSVLEEHIEGGMLREADLSKGEELQPLTLSLDKELDQTAQKLSKQQRKELKRLKAEQLDEFQIKGTEEDWSKALETNGTGGGSGLLSVKR

SEQ ID NO: 200 - DNA, 1479 bp, Drosophila melanogaster
  CDS (1)..(1479): CT6373
atgaatgacatggaggagattcctaagacggtgccacgcttggggttgcgacacctgcaggcaggtctgctcttctatggactcgcggcgaacacagtcctccagctaaacgtaagcgtggcagtagtggcgatgaccaacgaaactacatcaaataatagcgacccgccccactacaactggtcggaggagaagaagtcgtacatcctgtcgagctactactggggctgcgctctggcccaattcccagctggttatctgtgcaagcgctttggctcaaaggcggttctcttctggggcacgctgggatcatctctgcttagcgctctcacgacctacggggtctatgcaggcggctggaaggcgtactgtgcgattcgtctgctgcaggggctttgccaggtgacatggccctgcattcaccagcacttggctaactggtgtcccacggcggagcgaacgcgtctgggagcgtttgcatacactggctttgattgcggcaatgtgttagccatgtatggagcgggtatgatagccagttcatcgctggggtggcctgggatcagctactcggcagccggcttgggcctgatttggtgtggcctttggctgcttctgggagccaataaggcaagtgacgcccggttcataggggaggcggagaaggcctatattgtgggagatattcagcgatccgaaaggaaggggcccaaaaaaatggagattccctggaaaggcatttttacctctgttccagtctacgcccttctctgcgcccgttgtgctgacagctggggattgaccaccatgcaaaccgagttacctacatacttgagcggtgtcttgaaactcgatatgaagagcaacgcggttttttcggctcttccctttctgctcatgtgggtaatgtgctatgtgtacttgattattgcagatgtactgctgcgtaagaagtggatgagcttgacaacgttgagaaagacctacacgagcatagctctttgggcgccggcctctataatgctttccctagttattgtgggggaagggcaaaagaccttggtccttgttttggtaaccctcagtgtgggtgttagcagcgcagctacgattgggagtgagctgaatacgattgatttatcaccaaaccacgccgggatcctggccggcctcatgagcagcttcaccaatttgatggccctgctgactcctcttgtggtgggcgttttagtaacggaccccagtcagcggagccaatggcagatagtttttagcctggctgccggagttctgtttactggtaatgtgatttttttgatctgggggactgctgtgacacaaccatggaacgagtccaaggaatctcggcgggaactagagccggaggagaagccttttcaccgcgctaaactcgagataggaactgataatactgatggcaatgtagtaggcttaaaactaaactgtacaagcccttaa

SEQ ID NO: 201 - protein, 492 aa, Drosophila melanogaster
MNDMEEIPKTVPRLGLRHLQAGLLFYGLAANTVLQLNVSVAVVAMTNETTSNNSDPPHYNWSEEKKSYILSSYYWGCALAQFPAGYLCKRFGSKAVLFWGTLGSSLLSALTTYGVYAGGWKAYCAIRLLQGLCQVTWPCIHQHLANWCPTAERTRLGAFAYTGFDCGNVLAMYGAGMIASSSLGWPGISYSAAGLGLIWCGLWLLLGANKASDARFIGEAEKAYIVGDIQRSERKGPKKMEIPWKGIFTSVPVYALLCARCADSWGLTTMQTELPTYLSGVLKLDMKSNAVFSALPFLLMWVMCYVYLIIADVLLRKKWMSLTTLRKTYTSIALWAPASIMLSLVIVGEGQKTLVLVLVTLSVGVSSAATIGSELNTIDLSPNHAGILAGLMSSFTNLMALLTPLVVGVLVTDPSQRSQWQIVFSLAAGVLFTGNVIFLIWGTAVTQPWNESKESRRELEPEEKPFHRAKLEIGTDNTDGNVVGLKLNCTSP

SEQ ID NO: 202 - DNA, 1476 bp, Drosophila melanogaster
  CDS (1)..(1476): CT4336
atggcgcccgtgcaaggttcctacgactacgaccttattgtgattggaggcggctcagctggcctggcctgcgccaaggaggcagtcctcaatggagcccgtgtggcctgtctggatttcgttaagcccacgcccactctgggcaccaagtggggcgttggcggcacctgcgtgaacgtgggctgcattcccaagaagctgatgcaccaggcctcccttctgggcgaggctgtccatgaggcggccgcctacggctggaacgtggacgaaaagatcaagccagactggcacaagctggtgcagtccgtacagaaccacatcaagtccgtcaactgggtgacccgtgtggatctgcgcgacaagaaagtggagtacatcaatggactgggctccttcgtggactcgcacacactgctggccaagctgaagagcggcgagcgcacaatcaccgcccagaccttcgtcattgccgttggcggccgaccacgttatccggatattcccggtgctgtcgagtatggcatcaccagcgatgatctgttcagtttggaccgcgagcccggcaagaccctggtggtgggagctggctatattggcttggagtgcgctggattcctgaagggtctcggctacgagcccactgtgatggtgcgttctattgtgctgcgtggcttcgaccagcagatggccgagctggtggcagcctcgatggaggagcgtggcattcccttcctccgcaagacggtgccgctgtccgtggaaaagcaggatgatggcaagctgctcgtgaagtacaagaacgtggagaccggcgaggaggccgaggatgtttacgacaccgttctgtgggccatcggccgcaagggtctggtggacgatctgaacctgcccaatgccggcgtgactgtgcagaaggacaagattccagtggactcccaggaggctaccaatgtggcaaacatctacgctgtcggcgatatcatctatggcaagccagagctgacgcccgtcgccgttttggctggccgtttgctggcccgccgcctgtacggaggatctacccagcgcatggactacaaggatgtggccaccaccgttttcacgcccctggagtacgcctgcgtcggcctgagcgaggaggatgccgtcaagcagttcggagccgatgagatcgaggtgttccacggctactacaagcccacggagttcttcattccccagaagagcgtgcgctactgctacttgaaggctgtggccgagcgccatggtgaccagcgcgtctatggactgcactatattggcccggtggccggtgaggttatccagggattcgctgccgctttgaagtctggcctgactattaacacgctgatcaacaccgtgggcatccatcccactaccgccgaagaattcacccggctggccatcaccaagcgctccggactggaccccacgccggccagctgctgcagctaa

SEQ ID NO: 203 - protein, 491 aa, Drosophila melanogaster
MAPVQGSYDYDLIVIGGGSAGLACAKEAVLNGARVACLDFVKPTPTLGTKWGVGGTCVNVGCIPKKLMHQASLLGEAVHEAAAYGWNVDEKIKPDWHKLVQSVQNHIKSVNWVTRVDLRDKKVEYINGLGSFVDSHTLLAKLKSGERTITAQTFVIAVGGRPRYPDIPGAVEYGITSDDLFSLDREPGKTLVVGAGYIGLECAGFLKGLGYEPTVMVRSIVLRGFDQQMAELVAASMEERGIPFLRKTVPLSVEKQDDGKLLVKYKNVETGEEAEDVYDTVLWAIGRKGLVDDLNLPNAGVTVQKDKIPVDSQEATNVANIYAVGDIIYGKPELTPVAVLAGRLLARRLYGGSTQRMDYKDVATTVFTPLEYACVGLSEEDAVKQFGADEIEVFHGYYKPTEFFIPQKSVRYCYLKAVAERHGDQRVYGLHYIGPVAGEVIQGFAAALKSGLTINTLINTVGIHPTTAEEFTRLAITKRSGLDPTPASCCS

SEQ ID NO: 204 - DNA, 3003 bp, Drosophila melanogaster
  misc_feature (3000)..(3000): N=a, t, g or c
  misc_feature (1000)..(1000): The 'Xaa' at location 1000 stands for a stop codon, Trp, or Cys.
  CDS (1)..(3003): CT6738
atggccactatagatggaagaccggcgcaatatggaatttcacttaaacaactgcgcgagctcatggagcatcgtggtcgtgagggtgtaatgaagatagctgaaaatggtggcattcacgaactatgtaaaaagttatacacatctcccaatgaaggcctaagtggatcgaaagctgacgaagagcatagacgtgaaacattcggttccaatgttataccaccgaagccaccaaagacctttttgactctagtctgggaggctcttcaagatgtgacccttattatattagaggtagctgcattagtatcgcttggtctatcattttataaacccgccgacgaggatgcgcctgtgttgcaggaggaggaagaacaccatggttggattgaaggattggccattcttatttctgttattgtcgtagttatagtgacagcatttaatgattactctaaagaaagacaatttcgaggtctgcaaaatcgtatagagggcgagcacaagttttcagttattcgaggaggagaggtgtgccaaatatcagttggtgatattcttgttggcgatattgctcaagttaaatatggagacttattgccggctgatgggtgtcttattcaaagtaacgacttaaaggtggacgaatcttctctgactggagagtctgatcacgtcaaaaaggggccagatgttgatcccatggttttatccggcacgcatgttatggaaggaagcggcaaaatggttgttacagccgtaggggtaaactcacaagctggtataatttttacgctccttggtgcggcagttgacgaacaagaagcagaaattaagaagatgaaaaagggtgaaaacgatggtcgatcgcaaataaaggggtcccaagcgccatctcaacgcgaaacagtcacgagtgagataaccaaatctgagtctgaaggaaatcatttgccgcaatcatcgtcatcaggagcggctgaaacaggacataaaaaagaaaaatctgtgcttcaagctaaactaacaaaattagctatacagattggatatgctgggtcgaccattgccgtacttacagttataattctgatcattcagttttgtattaaaacgttcgttattgacgagaagccatggaaaaacacgtatgccaataacttggtgaagcatttgataattggtgttacagtattagtagtggccgtacctgaggggcttccattggcagtaaccctatccctagcatactcagtcaagaaaatgatgaaggacaataatttggttcgtcatttggatgcatgtgaaaccatgggtaatgccactgccatatgctctgataagactggcacacttacgaccaatcgtatgactgttgtacaatcctacatatgtgaaaaattgtgcaaggctggacacaacccaggagacttaccaattcaagttggcaataaaacggagtgtgctcttttgggatttgtccaagggttaggtgtgaagtatcaatctattcgagatgaaattacagaggataaatttacacgcgtatatacatttaattcagttcgcaagagcatgggtactgtgataccccgtcctaacggaggatatcgactgtatactaaaggagcttctgaaattattatgaaaaagtgtgcttttatctatggacatgagggcactttggagaagtttacgagagatatgcaagagcgtttaatacgtgaagttattgaaccaatggcatgtgacggtttgcggactatatctgtagcatatcgcgattttgtgcctggtaaagccgcaattaacgaagtgcatatcgatggggaacctaactgggatgatgaggaaaacattatgacaaatcttacatgcctctgtgtggttggtatagaagatcctgttcgtcccgaagtaccagacgcaattcgaaaatgtcaacgcgctggtataactgttcggatggtcaccggagacaatattaatacagcacgctcaattgccagcaaatgcggcattttgcgtcccaatgatgactttcttattctggaaggcaaagaatttaataggcgtattcgtgatagcaatggagatattcaacaacaccttatcgataaagtatggccaaaactgcgggttttagcacgctcatctccaactgacaagtatactttagtaaaaggtatcattgacagcaccgtaagtgaaaaccgagaagttgttgctgtaactggagacggcacaaatgatggtccagctttaaaaaaagccgatgtaggatttgctatgggtatagccggaacagatgttgccaaagaagcttccgatataatattaactgacgataattttagcagcattgttaaagctgtaatgtggggacgcaacgtatatgactctattgctaagtttttacagtttcagttaacagtaaatgtagtcgctgtaattgttgcatttattggtgcgtgtgctgtgcaagattcaccgcttaaagcagtgcaaatgttgtgggtgaacttaataatggatacattggcatcacttgcattagcaactgagtttcctacaccagatctattgctccgcaaaccctatggccgtacaaaacctttaatttcccgcacaatgatgaagaacatattgggtcaggcgctgtatcagttaataataatattcggattgttatttgtcggcgatgttatactcgatattgaatctggacgtggacaagaactaaacgcgggaccaacacagcactttactattatctttaatacttttgtcatgatgactttgtttaatgaaataaacgctagaaaaatccatgggcagcgcaatgtgctaatcatccaatatggtaaaatggctttctcgacgaaggctttaacattggatcagtggctatggtgtatattttttggaattggtacacttgtctggggacaactgattacctcagtacctacaagaaaattacctaagatattatcgtgntaa

SEQ ID NO: 205 - protein, 1000 aa, Drosophila melanogaster
  misc_feature (1000)..(1000): The 'Xaa' at location 1000 stands for a stop codon, Trp, or Cys.
MATIDGRPAQYGISLKQLRELMEHRGREGVMKIAENGGIHELCKKLYTSPNEGLSGSKADEEHRRETFGSNVIPPKPPKTFLTLVWEALQDVTLIILEVAALVSLGLSFYKPADEDAPVLQEEEEHHGWIEGLAILISVIVVVIVTAFNDYSKERQFRGLQNRIEGEHKFSVIRGGEVCQISVGDILVGDIAQVKYGDLLPADGCLIQSNDLKVDESSLTGESDHVKKGPDVDPMVLSGTHVMEGSGKMVVTAVGVNSQAGIIFTLLGAAVDEQEAEIKKMKKGENDGRSQIKGSQAPSQRETVTSEITKSESEGNHLPQSSSSGAAETGHKKEKSVLQAKLTKLAIQIGYAGSTIAVLTVIILIIQFCIKTFVIDEKPWKNTYANNLVKHLIIGVTVLVVAVPEGLPLAVTLSLAYSVKKMMKDNNLVRHLDACETMGNATAICSDKTGTLTTNRMTVVQSYICEKLCKAGHNPGDLPIQVGNKTECALLGFVQGLGVKYQSIRDEITEDKFTRVYTFNSVRKSMGTVIPRPNGGYRLYTKGASEIIMKKCAFIYGHEGTLEKFTRDMQERLIREVIEPMACDGLRTISVAYRDFVPGKAAINEVHIDGEPNWDDEENIMTNLTCLCVVGIEDPVRPEVPDAIRKCQRAGITVRMVTGDNINTARSIASKCGILRPNDDFLILEGKEFNRRIRDSNGDIQQHLIDKVWPKLRVLARSSPTDKYTLVKGIIDSTVSENREVVAVTGDGTNDGPALKKADVGFAMGIAGTDVAKEASDIILTDDNFSSIVKAVMWGRNVYDSIAKFLQFQLTVNVVAVIVAFIGACAVQDSPLKAVQMLWVNLIMDTLASLALATEFPTPDLLLRKPYGRTKPLISRTMMKNILGQALYQLIIIFGLLFVGDVILDIESGRGQELNAGPTQHFTIIFNTFVMMTLFNEINARKIHGQRNVLIIQYGKMAFSTKALTLDQWLWCIFFGIGTLVWGQLITSVPTRKLPKILSX

SEQ ID NO: 206 - DNA, 669 bp, Drosophila melanogaster
  CDS (1)..(669): CT5965
atggccgatgagaagaagaaggttaagaagaagaagaccaaggaagagggtggtacttccgaaaccgcttctgaggccgcatccgaggcagcaaccccggcaccagctgccactcctgccccggccgcatctgccactggttcgaagagagcgtcgggcggatcccgtggctccaggaagtcgaagcgcgctggctcctcggtcttctctgtgttctcccagaagcagatcgccgagttcaaggaggccttccaactcatggatgccgacaaggacggtattattggcaagaacgatctgcgcgctgccttcgactccgtcggcaagatcgccaacgacaaggagttggacgccatgctgggcgaggcctcgggtccgatcaacttcacccagttgctgaccctgttcgccaaccgcatggccacctccggtgccaacgatgaagacgaagttgttattgctgccttcaaaacattcgataacgatggtctcatcgacggtgacaaattccgcgaaatgctcatgaacttcggtgacaagttcaccatgaaggaggttgatgatgcctacgatcagatggtgatcgacgacaagaaccagatcgataccgccgccctgatcgagatgctcaccggcaagggtgaagaggaggaggaggaggccgcctaa

SEQ ID NO: 207 - protein, 222 aa, Drosophila melanogaster
MADEKKKVKKKKTKEEGGTSETASEAASEAATPAPAATPAPAASATGSKRASGGSRGSRKSKRAGSSVFSVFSQKQIAEFKEAFQLMDADKDGIIGKNDLRAAFDSVGKIANDKELDAMLGEASGPINFTQLLTLFANRMATSGANDEDEVVIAAFKTFDNDGLIDGDKFREMLMNFGDKFTMKEVDDAYDQMVIDDKNQIDTAALIEMLTGKGEEEEEEAA

SEQ ID NO: 208 - DNA, 639 bp, Drosophila melanogaster
  CDS (1)..(639): CT7322
atgaacggaatgaactattttccgaactattactccatcgaggacatattcgtgacccaggagaaggtggaatgtcgggtgaacaccaagctgcagcggatgggattcctggactccggcgcggaatcggatgacctggagcccggcaggacggtcaatctgccgttgtggtacatcaaggagctgaaggtaaacaatgcctacttcaccgtcgccgtgccagatatctatcgcaatgtgcataaggccgtctgcgaggcggagaccacgcacatcgagctgggacgcctgcacccgtacttctacgagttcggtcgctatctgacgccctacgatcgcaaccatgtcatcggccgcatcatcttcgaaacgctgcgccagagggtacgtcatctcctggacatctcgaagagcgacggacaggcagccaaggcggagcatcgactggataacatcgaggccaagctgcacgaggctggagtgcgcaccaacagtcagtacatcgaatggctgcagatgacgggcaacaagattcgcacctcggagctggtcgaggagcaccaaaagaagcggcgacgtgcggatcgcagcgatgacgagggcgatgctctgcccaacagcaagcgggccaccttgtaa

SEQ ID NO: 209 - protein, 212 aa, Drosophila melanogaster
MNGMNYFPNYYSIEDIFVTQEKVECRVNTKLQRMGFLDSGAESDDLEPGRTVNLPLWYIKELKVNNAYFTVAVPDIYRNVHKAVCEAETTHIELGRLHPYFYEFGRYLTPYDRNHVIGRIIFETLRQRVRHLLDISKSDGQAAKAEHRLDNIEAKLHEAGVRTNSQYIEWLQMTGNKIRTSELVEEHQKKRRRADRSDDEGDALPNSKRATL

SEQ ID NO: 210 - DNA, 1179 bp, Drosophila melanogaster
  CDS (1)..(1179): CT7705
atggccaactatcaaactgcccacgctcaagagcgacgcattcaagagctggaccaaactgtggaaagcattttcgatgtgcgaaagcgcatgggtaagggtgcctatggcatcgtctggaaggccactgacaggcgtacaaagaacacggtggccctgaagaaggtctttgatgccttccgcgacgaaaccgatgcccagcgcacctaccgtgaagttatattcctgcgggcctttcgctgccatcccaacatcgttcggctggtggatatctttaaggcctccaacaacttggacttttatttggtgttcgagttcatggagagcgatctgcacaatgtgatcaagcggggcaatgtcctcaaggacgttcacaagcgattcgttatgtatcagctgatcaatgcgattaagtttattcactcgggcaacgtcatccatagggacctgaaacccagcaacatcctgatcgacagcaaatgcaggctcaaagtggctgattttgggctggccagaaccctctcctcgagacgcatctatgatgatttggaacaggacggcatgctgactgattatgttgccacgcgttggtatcgcgcccccgaaattctggtggccagtcgcaactacaccaagggaatcgatatgtggggcctgggctgcatcctgggcgagatgatcaggcagaagcccctattccaaggcactagcactgtcaatcagattgagaagattgtgacttccctgccgaatgtgacaaagctggacatcgcttcgattggacccagcttcggcagcgtcctgctgagcaggaatatccaacgcgatcgccgctattcgctggacgaaatgatgaagaactgctgcgacgacggtatttcgctggtgaaggccctgctggtgctgaatccgcataaccggctgacagccaaggaggccataaggcatccttatgtgagtcgcttccagtacgcgtcggcggagatggatcttcacatggacgtcgtgccgccgctgaaagatcatgtgcgctacgacgtggaccagtatcgcaacagtctgtatgaactgattgaccgggagacgagttgcagtaaccgcacggtcagcaattccacgccatccagcaatcgggacgagttgccaaaacccgtgcgagtcacgaagcaagccaggtaa

SEQ ID NO: 211 - protein, 392 aa, Drosophila melanogaster
MANYQTAHAQERRIQELDQTVESIFDVRKRMGKGAYGIVWKATDRRTKNTVALKKVFDAFRDETDAQRTYREVIFLRAFRCHPNIVRLVDIFKASNNLDFYLVFEFMESDLHNVIKRGNVLKDVHKRFVMYQLINAIKFIHSGNVIHRDLKPSNILIDSKCRLKVADFGLARTLSSRRIYDDLEQDGMLTDYVATRWYRAPEILVASRNYTKGIDMWGLGCILGEMIRQKPLFQGTSTVNQIEKIVTSLPNVTKLDIASIGPSFGSVLLSRNIQRDRRYSLDEMMKNCCDDGISLVKALLVLNPHNRLTAKEAIRHPYVSRFQYASAEMDLHMDVVPPLKDHVRYDVDQYRNSLYELIDRETSCSNRTVSNSTPSSNRDELPKPVRVTKQAR

SEQ ID NO: 212 - DNA, 1407 bp, Drosophila melanogaster
  CDS (1)..(1407): CT8341
atgaccatggcagggcaaacgatcaacgacaggctgctggccgcccgtcacagccttgcgggccaaggactcgccaagtccgtttgcaaggccaccacggaggaatgcattggcccgaagaagaagcacttggactatttggtgcactgcgcaaacgagccgaatgtgtcgatacctcatctggccaatttacttatcgagcgttcacagaatgccaactgggtcgtcgtctacaagtcgctgataaccacacatcatctgatggcatatggcaatgagcgatttatgcaatatcttgcctctagcaattctacattcaatctcagctcctttctggacaaaggaactgtacaagatggtggcatgggcgttcctggtggcagaatgggttacgatatgtctccctttattcggcgttacgccaagtatttgaatgagaaatcgctctcctatcgagccatggcctttgacttttgcaaagtcaaacggggcaaagaggaaggctcgttacgcagcatgaacgcggaaaaacttctaaagactttgccagttttgcaggcacaattggatgcacttttggagttcgactgccaatccaacgacttgtctaatggcgtcatcaatatgagctttatgctcttgttccgcgatctcatacgattgtttgcttgctacaatgatggcatcataaatttgcttgaaaaatatttcgatatgaacaagaaacatgcccgcgatgcgttggatctttacaaaaagttcttagtgcgcatggatcgtgttggagagtttttaaaagtggctgagaatgtgggcatagacaagggtgacatacccgatttgaccaaggcgcccagttcgttgttagatgccttggagcagcacttggccacgcttgagggtcgaaaagtatccgctgctaatactcctacgcagtcatcaagctcggcatttggtactgcagctgcgtccagcaaatttgataccaccaacggcattgacgagcagcttaaggcccaggttttggccgaagaggaagccgctatgaaccaatacaagtccaaggtgtcgtcgcccactagcagcggtgctgctggcgctagcgctgcactagcaaatccatttctatcgtcgccgccagccgcgcaggctggccagccgatagttgatctgttcggtgccgcgtcggcgcagcccgctgctgctgcagcagccaccaaggcctctgacgatctgctgcagttgggcaatcctttcgcggacatgtttgacgccagcggtgggggagcagctgctgtaggagccacagggaatgccggtgatgggacagccaagtatgatgggggggcaggcagcagcccctttgactggggtgcaaccgacgatgatggcggcgccgcacagtaa

SEQ ID NO: 213 - protein, 468 aa, Drosophila melanogaster
MTMAGQTINDRLLAARHSLAGQGLAKSVCKATTEECIGPKKKHLDYLVHCANEPNVSIPHLANLLIERSQNANWVVVYKSLITTHHLMAYGNERFMQYLASSNSTFNLSSFLDKGTVQDGGMGVPGGRMGYDMSPFIRRYAKYLNEKSLSYRAMAFDFCKVKRGKEEGSLRSMNAEKLLKTLPVLQAQLDALLEFDCQSNDLSNGVINMSFMLLFRDLIRLFACYNDGIINLLEKYFDMNKKHARDALDLYKKFLVRMDRVGEFLKVAENVGIDKGDIPDLTKAPSSLLDALEQHLATLEGRKVSAANTPTQSSSSAFGTAAASSKFDTTNGIDEQLKAQVLAEEEAAMNQYKSKVSSPTSSGAAGASAALANPFLSSPPAAQAGQPIVDLFGAASAQPAAAAAATKASDDLLQLGNPFADMFDASGGGAAAVGATGNAGDGTAKYDGGAGSSPFDWGATDDDGGAAQ

SEQ ID NO: 214 - DNA, 5001 bp, Drosophila melanogaster
  CDS (1)..(5001): CT9021
atggcccctccgggccaaggaccaggagcgggaaccgctggggagcacgtcgacagcgatgacaacaactttaccgacgacgagagctcgcccctcacccacgacatttacggcggcagccaacgcaccatacaagagacgaagggttgggatgttttccgggatccgccaatcaaaattgagaccggatcgacggcgaaccaggaatgcttagaattaaccgtgaagatcttgaagatcttcgcctatgtgattacgtttataatagttttaaccggtggcgtcatcgccaagggcacaatgctcttcatgacttcgcaggtgcgcaaggataagaagatggagtactgcaacaaagacttgggtcgggacaaaagcttcgtagtccgacttccggaggaggagcgagtggcctggatctgggctctgctcatagcatatgcccttcccgagatcggagccttgatccgatccgcccgcatctgcttcttcaagacctttaaggtgccgaagacgggccacttcctcttcgtctggctgatggagagcttgagtgccgtgggcatggcgctgctgatgttcgtggttctgccccagatcgacgccatccagggcgccatgctaaccaactgcctgtgcgtcgtgccgggcatcttcggccttctatcgcgcacctccaaggagggcaagcgctttgtaaaggtgatcatcgatctggcggcggtggcggcccaggtgacgggcctggtgatctggccgctgctggagaaccgccgtgagctgtgggtcatcccggtggcctgtgtcatgatctcgtgcggctggtgggagaattacgtgtcgccacagtccccgctcggcctggttcgagccctgggtcgcatcaaggaggagatgaagtacactcgctacttctgccacatattcctatccatctggaagatcctgcttttcttcaccgtcacactgctcatctactgggcgcaaggcgaggaacccggcaatctgtttgccatgtacggagatgcctttggaccccacaagatcatagtctacgaactgccagcgggactgggcggtgtgcttccagataccctggaatcggccaacattgacaccgtggatgtggatgccgcctacaatacggtggtgtatgtactgcttctacagattttcggcgcctacttgtgctacatcttcggaaagttcgcctgcaagatcctcatccagggattcagctacgcgtttcccgtcagtctaactgttccgctctctgttacgttcctgatcgcagcctgtggaatccggatcgacgatccctgcttcttccatgacaccattccggactatctgttcttcacgagcccctcgaacttccggttcaacaactttgtcaccgagcaaatggcgtgggcctggatcctttggctcctcagtcagacctggatagcactgcacatctggactccgaagtgcgagcgtctggccaccaccgagaagttgtttgtccagcccatgtactcctctctactgatcgatcagtcgatggccctcaaccgaaggcgcgatgaccaggcagatgtgaaaacagaggatctctcggagatcgaaaaggaaaagggcgatgagtactacgagaccatttctgtgcacacggatcgctcctcggcacccaacaagccatcgattaagtcctccgacaacatcacacgaatctactcctgcgcgaccatgtggcatgagacgaaggacgagatgatagagttcttgaagagcatcatgcgaatggacgaggaccagtgtgctcgtcgcgtggctcaaaagtatctgagggttctcgatccggactattatgaatttgagacccacatcttcttcgatgacgccttcgaaatctccgatcacagcgacgatgatatccagtgcaatcgattcgtcaagctcttgatagccaccatggacgaggctgcctccgagatccatcagaccacgatcagactgcgtccgcccaagaagtatcccactccgtacggaggccgcctggtgtggacccttccagggaagaccaaattcattacgcacttaaaggacaaggaccgcattcgtcacaggaagcgttggtctcaggtcatgtacatgtattacctgctgggacatcgtctaatggagctgcccatttcggtggatcgcaaggatgcaattgcggagaacacctaccttttgaccctggacggagatattgacttcaagccgaatgcggtgactctactggtggatctgatgaagaagaacaagaacctgggtgctgcctgcggtcgcattcatcccgtgggatcgggacccatggtgtggtaccaacttttcgaatacgccatcggccattggctgcaaaaggccacggagcacatgattggctgcgtgctctgttcacctggatgcttctccctgttcaggggcaaggccctcatggatgacaatgtgatgaagaaatacacgacacggtcggatgaggctcgtcactacgtgcagtacgatcagggcgaggatcgttggctgtgcacattgctcctccagaggggataccgcgtggagtactcggctgccagtgatgcgtacacccactgccccgagggattcaatgagttctacaaccagcggcgcagatgggtgccctcgaccatagccaacatcatggatcttctggcggatgcgaagcgcacgatcaagatcaatgacaacatttcgcttctgtacatcttctaccagatgatgttgatgggcggcaccatcctgggacccggaaccattttccttatgttggtgggtgcattcgtggcagcctttcgcattgacaactggacctccttccactacaacatcgtgccgatcctggccttcatgtttatctgcttcacctgtaagtcgaacatccagttgttcgtggcccaagtcctttcgacggcatatgccctgatcatgatggcggtgattgtgggtacggccttgcagttgggagaggacggaataggctccccttcggccattttcctgatatccatggtgggctcattcttcatagccgcatgtttgcatccacaagagttctggtgcattacatgcggcctaatctatttgctgtccatcccgtccatgtacctgctgctcatcttgtactctatcatcaacctaaacgtcgtctcctggggcacccgcgaggtggtggctaagaagaccaagaaagaactggaggcggagaagaaggccgccgaggaggccaaaaagagggtgaagcagaagagcatgctgagcttccttcagagtggaatcggggacaatggcgacgaggagggctccgtggagttctctctcgctggactcttccgctgcatattctgcacccacggaaaaacatccgacgagaagcagcagctgacctccatcgccgaatcgctggacacgatcaaacatcgaatggacaccatcgagagtgctgtggatccccatggtcaccatgcctcccgacatggcaggaggagaaccacatccagtggctccaaggatcaccacctgctgacctcggtggcggagaagtctggcgatgaatcggacgagtcggactcagacacttcggcggaaccaaagcaggagcgagactttctaaccaatccctactggatcgaggaccccgatgtacgcaagggcgaggtcgattttctctccagcaccgagatccagttctggaaggatctcatcgaccagtatctctatcccatcgacaatgatcccgtggagcaggcccgcatagccaaagatctgaaggagctgcgcgactcgtcggtgttcgcgttcttcatgatcaatgcactgttcgtgctgatcgtgttcctgctgcagctgaacaaggacaacatccacgtgaagtggcccttcggagtgcggacgaacatcacctacgacgagtccacccaggaggcccgcattgcctccgacctgattgagctgcggaacaagtcggtctttgcgtttttcatggccaacgccctgttcgtgctgattgtcttcttgttgcaactgaacaaggacaagctacacattatttggccgttgggcgtcaaaaccaacattacctatatcgaagagacatccgaggtgcacatctccaaggagtaccttcagctggagcccatcggattggtgttcgtattcttctttgctcttattttgataatccagttcacggccatgctgttccatcgatttggaaccatttcgcacatcctggcctcgactgaactcaacttctgcaagaagaagtctgaggatctgacacaggaccaactaatagataagcatgctgtggagatcgtcaagaacttgcagaggctgcagggaatcgatggcgactacgacaatgactccggttccgggccagatcgcatagccaggcggaagaccattcaaaatctggagaaggcgcgacagccacgtcgccagatcggcaccctggatgtggcgttcaagaagcgcttcctgaaactcaccgccgatgcggagaacaatccggccacgcccattctcacccgccgcctgacaatgcgggcggagaccatccgggcactggaggtgcgtaagaattcggtgatggccgaaaggcggaagtccgcgatgcaaactctgggagcaaagaacgagtacggaatcacaactggagcaccgattaacaacaatggagctctgccgaatcagcgaagcggacgtgtctcgaatgcaggcatcagcatcaaggatgtattcaatgtgaacggtggtggtgccgagcagatttacggctcgaatgggggcggcactatcaaccagggttacgagcatgtgatcgacgaggacggcgacggcaactccctgcggctgaccaccaggaatccccatccccacccgcaccaccaggtctcctggggccagaacaccaacggcggcggcggtaatggcacaggtcgcctgtaa

SEQ ID NO: 215 - protein, 1666 aa, Drosophila melanogaster
MAPPGQGPGAGTAGEHVDSDDNNFTDDESSPLTHDIYGGSQRTIQETKGWDVFRDPPIKIETGSTANQECLELTVKILKIFAYVITFIIVLTGGVIAKGTMLFMTSQVRKDKKMEYCNKDLGRDKSFVVRLPEEERVAWIWALLIAYALPEIGALIRSARICFFKTFKVPKTGHFLFVWLMESLSAVGMALLMFVVLPQIDAIQGAMLTNCLCVVPGIFGLLSRTSKEGKRFVKVIIDLAAVAAQVTGLVIWPLLENRRELWVIPVACVMISCGWWENYVSPQSPLGLVRALGRIKEEMKYTRYFCHIFLSIWKILLFFTVTLLIYWAQGEEPGNLFAMYGDAFGPHKIIVYELPAGLGGVLPDTLESANIDTVDVDAAYNTVVYVLLLQIFGAYLCYIFGKFACKILIQGFSYAFPVSLTVPLSVTFLIAACGIRIDDPCFFHDTIPDYLFFTSPSNFRFNNFVTEQMAWAWILWLLSQTWIALHIWTPKCERLATTEKLFVQPMYSSLLIDQSMALNRRRDDQADVKTEDLSEIEKEKGDEYYETISVHTDRSSAPNKPSIKSSDNITRIYSCATMWHETKDEMIEFLKSIMRMDEDQCARRVAQKYLRVLDPDYYEFETHIFFDDAFEISDHSDDDIQCNRFVKLLIATMDEAASEIHQTTIRLRPPKKYPTPYGGRLVWTLPGKTKFITHLKDKDRIRHRKRWSQVMYMYYLLGHRLMELPISVDRKDAIAENTYLLTLDGDIDFKPNAVTLLVDLMKKNKNLGAACGRIHPVGSGPMVWYQLFEYAIGHWLQKATEHMIGCVLCSPGCFSLFRGKALMDDNVMKKYTTRSDEARHYVQYDQGEDRWLCTLLLQRGYRVEYSAASDAYTHCPEGFNEFYNQRRRWVPSTIANIMDLLADAKRTIKINDNISLLYIFYQMMLMGGTILGPGTIFLMLVGAFVAAFRIDNWTSFHYNIVPILAFMFICFTCKSNIQLFVAQVLSTAYALIMMAVIVGTALQLGEDGIGSPSAIFLISMVGSFFIAACLHPQEFWCITCGLIYLLSIPSMYLLLILYSIINLNVVSWGTREVVAKKTKKELEAEKKAAEEAKKRVKQKSMLSFLQSGIGDNGDEEGSVEFSLAGLFRCIFCTHGKTSDEKQQLTSIAESLDTIKHRMDTIESAVDPHGHHASRHGRRRTTSSGSKDHHLLTSVAEKSGDESDESDSDTSAEPKQERDFLTNPYWIEDPDVRKGEVDFLSSTEIQFWKDLIDQYLYPIDNDPVEQARIAKDLKELRDSSVFAFFMINALFVLIVFLLQLNKDNIHVKWPFGVRTNITYDESTQEARIASDLIELRNKSVFAFFMANALFVLIVFLLQLNKDKLHIIWPLGVKTNITYIEETSEVHISKEYLQLEPIGLVFVFFFALILIIQFTAMLFHRFGTISHILASTELNFCKKKSEDLTQDQLIDKHAVEIVKNLQRLQGIDGDYDNDSGSGPDRIARRKTIQNLEKARQPRRQIGTLDVAFKKRFLKLTADAENNPATPILTRRLTMRAETIRALEVRKNSVMAERRKSAMQTLGAKNEYGITTGAPINNNGALPNQRSGRVSNAGISIKDVFNVNGGGAEQIYGSNGGGTINQGYEHVIDEDGDGNSLRLTTRNPHPHPHHQVSWGQNTNGGGGNGTGRL

SEQ ID NO: 216 - DNA, 3471 bp, Drosophila melanogaster
  CDS (1)..(3471): CT9593
atgtcccccggcgcccatttgcagatgtccccgcagaacacttcgtccctaagtcaacaccatccacatcaacagcaacagttacaacccccacagcagcaacaacagcatttccctaaccatcacagcgcccagcaacagtcgcagcagcagcagcaacaggagcaacagaatccccagcagcaggcgcaacagcagcagcagatactcccacatcaacatttgcagcacctgcacaagcatccgcatcagctgcaactgcatcagcagcagcaacaacaactccaccagcaacagcagcaacacttccaccagcagtcgctgcaagggctgcatcagggtagcagcaatccggattcgaatatgagcactggctcctcgcatagcgagaaggatgtcaatgatatgctgagtggcggtgcagcaacgccaggagctgcagcagcagcgattcaacagcaacatcccgcctttgcgcccacactgggaatgcagcaaccaccgccgcccccacctcaacactccaataatggaggcgagatgggctacttgtcggcaggcacgaccacgacgacgtcggtgttaacggtaggcaagcctcggacgccagcggagcggaaacggaagcgaaaaatgcctccatgtgccactagtgcggatgaggcggggagtggcggtggctctggcggagcaggagcaaccgttgttaacaacagcagcctgaagggcaaatcattggcctttcgtgatatgcccaaggtaaacatgagcctgaatctgggcgatcgtctgggaggatctgcaggaagcggagtaggagccggtggcgccggaagcgggggaggtggcgctggttccggttctggaagcggtggcggcaaaagcgcccgcctgatgctgccagtcagcgacaacaagaagatcaacgactatttcaataagcagcaaacgggcgtgggcgtcggtgtgccaggtggtgcgggaggcaataccgctggccttcgaggatcacatacgggaggtggcagcaagtcaccctcatccgcccagcagcagcaaacggcggcacagcagcagggaagcggtgttgcgacgggaggcagtgcaggcggttccgctggcaaccaggtgcaagtgcaaacgagcagcgcttacgccctttacccaccagctagtccccaaacccagacgtcacagcaacagcagcagcagcaaccgggatcagactttcactatgtcaactccagcaaggcgcagcaacaacagcagcgtcaacagcaacagacttccaatcaaatggttcctccacacgtggtcgttggccttggtggtcatccactgagcctcgcgtccattcagcagcagacgcccttatcccagcagcaacagcagcaacaacagcagcagcaacagcagcaactgggaccaccgaccacatcgacggcctccgtcgtgccaacgcatccgcatcaactcggatccctgggagttgttgggatggtcggtgtgggtgttggcgtgggcgttggagtaaatgtgggtgtgggaccaccactgccaccaccaccgccgatggccatgccagcggccattatcacttatagtaaggccactcaaacggaggtgtcgctgcatgaattgcaggagcgcgaagcggagcacgaatcgggcaaggtgaagctagacgagatgacacggctgtccgatgaacaaaagtcccaaattgttggcaaccagaagacgattgaccagcacaagtgccacatagccaagtgtattgatgtggtcaagaagctgttgaaggagaagagcagcatcgagaagaaggaggcgcgacagaagtgcatgcagaatcgcctcaggctcggacagtttgttacccaacgagtgggcgccacattccaggagaactggacggacggctatgcgttccaggagctgagtcggcggcaagaagaaataaccgctgagcgtgaagagatagatcggcagaaaaagcagctgatgaaaaagcgtccggcggagtccggacgcaagcgcaacaacaacagtaaccagaacaaccagcagcagcagcaacagcaacaccagcaacagcagcagcaacaaaattccaactcgaacgattccacgcagctgacgagcggagttgttaccggtccaggcagtgatcgtgtgagcgtaagcgtcgacagcggattgggtggcaataatgcgggcgcgatcggtggcggaaccgttggtggtggcgttggaggtggtggtgttggaggcggtggtgtcggaggcggcggtggacgtggactttctcgcagcaattcgacgcaggccaatcaggctcaattgctgcacaacggcggtggtggttcgggcggcaatgtcggcaactcgggcggcgttggcgaccgcttgtcagatcgaggaggaggaggtggcggcatcggcggaaacgatagcggcagctgctcggactcgggcactttcctgaagccagaccccgtatcgggtgcctacacagcgcaggagtattacgagtacgatgagatcctcaagttgcgacaaaatgccctcaaaaaggaggacgccgacctgcagctggagatggagaagctggagcgggagcgcaatctgcacatccgagagctcaagcggattcttaacgaggatcagtcccgctttaacaatcatcccgtgctgaatgatcgctatcttctgttgatgctcctgggcaagggcggcttctcagaggtccacaaggccttcgacctgaaggagcaacgctatgtcgcatgtaaggtgcaccaattaaacaaggattggaaggaggataagaaagctaattatatcaaacacgctttgcgggaatacaacattcacaaggcactggatcatccgcgggtcgtcaagctatacgatgtcttcgagatcgatgcgaattccttttgcacagtgctcgaatactgtgatggccacgatctggacttctatttgaagcaacataagactatacccgagcgtgaagcgcgctcgataataatgcaggttgtatctgcactcaagtatctaaatgagattaagcctccagttatccactacgatctgaagcccggcaacattctgcttaccgagggcaacgtctgcggcgagattaagatcaccgacttcggtctgtcaaaggtgatggacgacgagaattacaatcccgatcacggcatggatctgacctctcagggggcgggaacctactggtatctgccacccgagtgctttgtcgtgggcaaaaatccgccgaaaatctcctccaaagtggacgtatggagtgtgggtgttatcttctaccagtgtctgtacggcaaaaagcccttcggtcacaatcagtcgcaggccacgattctcgaggagaatacgatcctgaaggccaccgaagtgcagttctccaacaagccaaccgtttctaacgaggccaagtaa

SEQ ID NO: 217 - protein, 1156 aa, Drosophila melanogaster
MSPGAHLQMSPQNTSSLSQHHPHQQQQLQPPQQQQQHFPNHHSAQQQSQQQQQQEQQNPQQQAQQQQQILPHQHLQHLHKHPHQLQLHQQQQQQLHQQQQQHFHQQSLQGLHQGSSNPDSNMSTGSSHSEKDVNDMLSGGAATPGAAAAAIQQQHPAFAPTLGMQQPPPPPPQHSNNGGEMGYLSAGTTTTTSVLTVGKPRTPAERKRKRKMPPCATSADEAGSGGGSGGAGATVVNNSSLKGKSLAFRDMPKVNMSLNLGDRLGGSAGSGVGAGGAGSGGGGAGSGSGSGGGKSARLMLPVSDNKKINDYFNKQQTGVGVGVPGGAGGNTAGLRGSHTGGGSKSPSSAQQQQTAAQQQGSGVATGGSAGGSAGNQVQVQTSSAYALYPPASPQTQTSQQQQQQQPGSDFHYVNSSKAQQQQQRQQQQTSNQMVPPHVVVGLGGHPLSLASIQQQTPLSQQQQQQQQQQQQQQLGPPTTSTASVVPTHPHQLGSLGVVGMVGVGVGVGVGVNVGVGPPLPPPPPMAMPAAIITYSKATQTEVSLHELQEREAEHESGKVKLDEMTRLSDEQKSQIVGNQKTIDQHKCHIAKCIDVVKKLLKEKSSIEKKEARQKCMQNRLRLGQFVTQRVGATFQENWTDGYAFQELSRRQEEITAEREEIDRQKKQLMKKRPAESGRKRNNNSNQNNQQQQQQQHQQQQQQQNSNSNDSTQLTSGVVTGPGSDRVSVSVDSGLGGNNAGAIGGGTVGGGVGGGGVGGGGVGGGGGRGLSRSNSTQANQAQLLHNGGGGSGGNVGNSGGVGDRLSDRGGGGGGIGGNDSGSCSDSGTFLKPDPVSGAYTAQEYYEYDEILKLRQNALKKEDADLQLEMEKLERERNLHIRELKRILNEDQSRFNNHPVLNDRYLLLMLLGKGGFSEVHKAFDLKEQRYVACKVHQLNKDWKEDKKANYIKHALREYNIHKALDHPRVVKLYDVFEIDANSFCTVLEYCDGHDLDFYLKQHKTIPEREARSIIMQVVSALKYLNEIKPPVIHYDLKPGNILLTEGNVCGEIKITDFGLSKVMDDENYNPDHGMDLTSQGAGTYWYLPPECFVVGKNPPKISSKVDVWSVGVIFYQCLYGKKPFGHNQSQATILEENTILKATEVQFSNKPTVSNEAK

SEQ ID NO: 218 - DNA, 606 bp, Drosophila melanogaster
  CDS (1)..(606): CT9754
atgagcaagaagccgacagccggaccggcgctccacaaggtcataatggtgggcagtggcggcgtgggaaagtccgccctcacactgcagtttatgtacgatgagttcgtcgaggactacgagcccaccaaggccgatagctataggaaaaaggttgtgctggacggcgaggaagtacaaatagatatattggatacggctggccaggaggattatgccgccatcagagataactactttcgcagcggcgagggtttcctttgcgtcttctccatcacagacgacgaaagcttccaggcaacccaggaattcagagaacaaatcttgcgggtgaagaatgatgagagcataccgttcctgctggtgggcaacaagtgcgatctgaatgataagcgcaaggtgccgctgagcgagtgccagctgagggcgcagcagtgggcggtgccctatgtggagacctcggctaaaacccgcgaaaatgtggacaaggtattttttgatttgatgcgcgaaataagatcacgaaaaaccgaagattcgaaagccacgagcgggcgtgctaaagatagatgcaagaagcggagacttaagtgtaccctactttag

SEQ ID NO: 219 - protein, 201 aa, Drosophila melanogaster
MSKKPTAGPALHKVIMVGSGGVGKSALTLQFMYDEFVEDYEPTKADSYRKKVVLDGEEVQIDILDTAGQEDYAAIRDNYFRSGEGFLCVFSITDDESFQATQEFREQILRVKNDESIPFLLVGNKCDLNDKRKVPLSECQLRAQQWAVPYVETSAKTRENVDKVFFDLMREIRSRKTEDSKATSGRAKDRCKKRRLKCTLL

SEQ ID NO: 220 - DNA, 3507 bp, Drosophila melanogaster
  CDS (1)..(3507): CT9660
atgtgtgtgcagaaaaatatgcggcgcttaaaaaagatgtcccccggcgcccatttgcagatgtccccgcagaacacttcgtccctaagtcaacaccatccacatcaacagcaacagttacaacccccacagcagcaacaacagcatttccctaaccatcacagcgcccagcaacagtcgcagcagcagcagcaacaggagcaacagaatccccagcagcaggcgcaacagcagcagcagatactcccacatcaacatttgcagcacctgcacaagcatccgcatcagctgcaactgcatcagcagcagcaacaacaactccaccagcaacagcagcaacacttccaccagcagtcgctgcaagggctgcatcagggtagcagcaatccggattcgaatatgagcactggctcctcgcatagcgagaaggatgtcaatgatatgctgagtggcggtgcagcaacgccaggagctgcagcagcagcgattcaacagcaacatcccgcctttgcgcccacactgggaatgcagcaaccaccgccgcccccacctcaacactccaataatggaggcgagatgggctacttgtcggcaggcacgaccacgacgacgtcggtgttaacggtaggcaagcctcggacgccagcggagcggaaacggaagcgaaaaatgcctccatgtgccactagtgcggatgaggcggggagtggcggtggctctggcggagcaggagcaaccgttgttaacaacagcagcctgaagggcaaatcattggcctttcgtgatatgcccaaggtaaacatgagcctgaatctgggcgatcgtctgggaggatctgcaggaagcggagtaggagccggtggcgccggaagcgggggaggtggcgctggttccggttctggaagcggtggcggcaaaagcgcccgcctgatgctgccagtcagcgacaacaagaagatcaacgactatttcaataagcagcaaacgggcgtgggcgtcggtgtgccaggtggtgcgggaggcaataccgctggccttcgaggatcacatacgggaggtggcagcaagtcaccctcatccgcccagcagcagcaaacggcggcacagcagcagggaagcggtgttgcgacgggaggcagtgcaggcggttccgctggcaaccaggtgcaagtgcaaacgagcagcgcttacgccctttacccaccagctagtccccaaacccagacgtcacagcaacagcagcagcagcaaccgggatcagactttcactatgtcaactccagcaaggcgcagcaacaacagcagcgtcaacagcaacagacttccaatcaaatggttcctccacacgtggtcgttggccttggtggtcatccactgagcctcgcgtccattcagcagcagacgcccttatcccagcagcaacagcagcaacaacagcagcagcaacagcagcaactgggaccaccgaccacatcgacggcctccgtcgtgccaacgcatccgcatcaactcggatccctgggagttgttgggatggtcggtgtgggtgttggcgtgggcgttggagtaaatgtgggtgtgggaccaccactgccaccaccaccgccgatggccatgccagcggccattatcacttatagtaaggccactcaaacggaggtgtcgctgcatgaattgcaggagcgcgaagcggagcacgaatcgggcaaggtgaagctagacgagatgacacggctgtccgatgaacaaaagtcccaaattgttggcaaccagaagacgattgaccagcacaagtgccacatagccaagtgtattgatgtggtcaagaagctgttgaaggagaagagcagcatcgagaagaaggaggcgcgacagaagtgcatgcagaatcgcctcaggctcggacagtttgttacccaacgagtgggcgccacattccaggagaactggacggacggctatgcgttccaggagctgagtcggcggcaagaagaaataaccgctgagcgtgaagagatagatcggcagaaaaagcagctgatgaaaaagcgtccggcggagtccggacgcaagcgcaacaacaacagtaaccagaacaaccagcagcagcagcaacagcaacaccagcaacagcagcagcaacaaaattccaactcgaacgattccacgcagctgacgagcggagttgttaccggtccaggcagtgatcgtgtgagcgtaagcgtcgacagcggattgggtggcaataatgcgggcgcgatcggtggcggaaccgttggtggtggcgttggaggtggtggtgttggaggcggtggtgtcggaggcggcggtggacgtggactttctcgcagcaattcgacgcaggccaatcaggctcaattgctgcacaacggcggtggtggttcgggcggcaatgtcggcaactcgggcggcgttggcgaccgcttgtcagatcgaggaggaggaggtggcggcatcggcggaaacgatagcggcagctgctcggactcgggcactttcctgaagccagaccccgtatcgggtgcctacacagcgcaggagtattacgagtacgatgagatcctcaagttgcgacaaaatgccctcaaaaaggaggacgccgacctgcagctggagatggagaagctggagcgggagcgcaatctgcacatccgagagctcaagcggattcttaacgaggatcagtcccgctttaacaatcatcccgtgctgaatgatcgctatcttctgttgatgctcctgggcaagggcggcttctcagaggtccacaaggccttcgacctgaaggagcaacgctatgtcgcatgtaaggtgcaccaattaaacaaggattggaaggaggataagaaagctaattatatcaaacacgctttgcgggaatacaacattcacaaggcactggatcatccgcgggtcgtcaagctatacgatgtcttcgagatcgatgcgaattccttttgcacagtgctcgaatactgtgatggccacgatctggacttctatttgaagcaacataagactatacccgagcgtgaagcgcgctcgataataatgcaggttgtatctgcactcaagtatctaaatgagattaagcctccagttatccactacgatctgaagcccggcaacattctgcttaccgagggcaacgtctgcggcgagattaagatcaccgacttcggtctgtcaaaggtgatggacgacgagaattacaatcccgatcacggcatggatctgacctctcagggggcgggaacctactggtatctgccacccgagtgctttgtcgtgggcaaaaatccgccgaaaatctcctccaaagtggacgtatggagtgtgggtgttatcttctaccagtgtctgtacggcaaaaagcccttcggtcacaatcagtcgcaggccacgattctcgaggagaatacgatcctgaaggccaccgaagtgcagttctccaacaagccaaccgtttctaacgaggccaagtaa

SEQ ID NO: 221 - protein, 1168 aa, Drosophila melanogaster
MCVQKNMRRLKKMSPGAHLQMSPQNTSSLSQHHPHQQQQLQPPQQQQQHFPNHHSAQQQSQQQQQQEQQNPQQQAQQQQQILPHQHLQHLHKHPHQLQLHQQQQQQLHQQQQQHFHQQSLQGLHQGSSNPDSNMSTGSSHSEKDVNDMLSGGAATPGAAAAAIQQQHPAFAPTLGMQQPPPPPPQHSNNGGEMGYLSAGTTTTTSVLTVGKPRTPAERKRKRKMPPCATSADEAGSGGGSGGAGATVVNNSSLKGKSLAFRDMPKVNMSLNLGDRLGGSAGSGVGAGGAGSGGGGAGSGSGSGGGKSARLMLPVSDNKKINDYFNKQQTGVGVGVPGGAGGNTAGLRGSHTGGGSKSPSSAQQQQTAAQQQGSGVATGGSAGGSAGNQVQVQTSSAYALYPPASPQTQTSQQQQQQQPGSDFHYVNSSKAQQQQQRQQQQTSNQMVPPHVVVGLGGHPLSLASIQQQTPLSQQQQQQQQQQQQQQLGPPTTSTASVVPTHPHQLGSLGVVGMVGVGVGVGVGVNVGVGPPLPPPPPMAMPAAIITYSKATQTEVSLHELQEREAEHESGKVKLDEMTRLSDEQKSQIVGNQKTIDQHKCHIAKCIDVVKKLLKEKSSIEKKEARQKCMQNRLRLGQFVTQRVGATFQENWTDGYAFQELSRRQEEITAEREEIDRQKKQLMKKRPAESGRKRNNNSNQNNQQQQQQQHQQQQQQQNSNSNDSTQLTSGVVTGPGSDRVSVSVDSGLGGNNAGAIGGGTVGGGVGGGGVGGGGVGGGGGRGLSRSNSTQANQAQLLHNGGGGSGGNVGNSGGVGDRLSDRGGGGGGIGGNDSGSCSDSGTFLKPDPVSGAYTAQEYYEYDEILKLRQNALKKEDADLQLEMEKLERERNLHIRELKRILNEDQSRFNNHPVLNDRYLLLMLLGKGGFSEVHKAFDLKEQRYVACKVHQLNKDWKEDKKANYIKHALREYNIHKALDHPRVVKLYDVFEIDANSFCTVLEYCDGHDLDFYLKQHKTIPEREARSIIMQVVSALKYLNEIKPPVIHYDLKPGNILLTEGNVCGEIKITDFGLSKVMDDENYNPDHGMDLTSQGAGTYWYLPPECFVVGKNPPKISSKVDVWSVGVIFYQCLYGKKPFGHNQSQATILEENTILKATEVQFSNKPTVSNEAK

SEQ ID NO: 222 - DNA, 474 bp, Drosophila melanogaster
  CDS (1)..(474): CT6171
atgtccttcgttaagaacgcccgtttgttggccgcccgcggcgctcgcttggcccagaaccgcagctactcggatgagatgaagctgaccttcgccgccgccaacaaaaccttctacgatgccgctgtggtgcgccaaatcgatgtgccttccttctcgggatccttcggcatcctggccaagcacgtgcccactctggctgtcctgaagcccggcgttgtccaggtggtggaaaacgatggcaagaccctcaagttcttcgtctccagcggttccgtcaccgtcaacgaggattcctccgttcaggttctggccgaggaggcccacaacatcgaggacatcgatgccaatgaggcgcgccagctgctcgcgaaataccagtcacagcttagctccgctggcgacgacaaggccaaggcccaggctgccattgccgtggaggtcgccgaagcgttagtcaaggctgccgaatag

SEQ ID NO: 223 - protein, 157 aa, Drosophila melanogaster
MSFVKNARLLAARGARLAQNRSYSDEMKLTFAAANKTFYDAAVVRQIDVPSFSGSFGILAKHVPTLAVLKPGVVQVVENDGKTLKFFVSSGSVTVNEDSSVQVLAEEAHNIEDIDANEARQLLAKYQSQLSSAGDDKAKAQAAIAVEVAEALVKAAE

SEQ ID NO: 224 - DNA, 432 bp, Drosophila melanogaster
  CDS (1)..(432): CT10206
atggccagcggatccaggacaaccattttgccccagtcgaaggaggcgcttctgaagtcctataatgcgcgcctcaaggacgacgttcgcagcatgctggagaattttgaagaaatactcaagctggcgcgccgtgagagccacagccagatttcgaagaccacgcagtgcgaacaggatgccctggaaatgcaggtccgcgcggccaacatggtccgtgccggcgagtctctgatgaagctggtggccgacctaaaacagtacctaatcctcaacgactttcactcggtcaacgaggccatcacaaacaattcgcagctgttcaggaacacacagagcgagtgcgacaagaagctgatgaaacttagggacgaaatggccatggacttgtacgacctggaggaggagtactacaccagcatttttaagtaa

SEQ ID NO: 225 - protein, 143 aa, Drosophila melanogaster
MASGSRTTILPQSKEALLKSYNARLKDDVRSMLENFEEILKLARRESHSQISKTTQCEQDALEMQVRAANMVRAGESLMKLVADLKQYLILNDFHSVNEAITNNSQLFRNTQSECDKKLMKLRDEMAMDLYDLEEEYYTSIFK

SEQ ID NO: 226 - DNA, 1146 bp, Drosophila melanogaster
  CDS (1)..(1146): CT41361
atgcagaactcctttcttccactgaacacacggcgttttcgacagcgggcccaggtggaaacgccggatacggtgtactgggaccgactggcgaaaccagaactactcaaggagcacaacaccatcgattatttggacttcagtccaagcgatcctgacaactttgttgtgacctgttcggtgcgcgttcagatttacaacctggtgaccatgcttgtggtaaagaacctttcccgattccaaaagaccgcatacggctgccgtctgctcaccatgatgtcgcagcatcacaaaacagtaacttgtctgcgactgggatccgatggcaggagattgctctcaggcgggctcgataggcacgtgaaaatctacgatgtgagcacctacaaaacagtgcacacattgacttatcccaatgcggtggtcagcatggctgttgctgacggagatcaagcagttgtggctggaatggtcgatggtctagtctccattcgtcgcatgatggtagacagcaagcccagtcatttgaaaaagattcgtgcggatcgcgctcgaaagtacttcgtgagtacgaaacgcacgaacaacacccaagaggttgatcacaccatcaaggaccacgtcaaggggcctggattgaaatcctacgatgtgcacttgcgccagtttaaccacaagaaggctttggacgacgtgatgaatgcgcagaagatgcaataccagccggagctcattgtggctgtcatcacggaccttctgcaccgtggatcactgggaaaagccctcacgggtcgtcatgaggcagcgcttgtccgattcatcgacttcatttgcaaccacttgggcgaggtgcgattcatgcgcccgctgatgatggccgcgagcacggtccttgatgtcttcgagcaacgattggtggcctacagccagaagctgatgaaagccttgcaacgattgtcacttgcaatgcaggaggaggtgaggctcaccgccgagctgatgcggatgaagggtgctgtggatatgctcattgggatttcaatggacaatagcgaggtagcccataagcccacctatgtggagacaaagacacctaagatgcatccctccgtggcggcgcaaaattatgtggtcttagttgagtaa

SEQ ID NO: 227 - protein, 381 aa, Drosophila melanogaster
MQNSFLPLNTRRFRQRAQVETPDTVYWDRLAKPELLKEHNTIDYLDFSPSDPDNFVVTCSVRVQIYNLVTMLVVKNLSRFQKTAYGCRLLTMMSQHHKTVTCLRLGSDGRRLLSGGLDRHVKIYDVSTYKTVHTLTYPNAVVSMAVADGDQAVVAGMVDGLVSIRRMMVDSKPSHLKKIRADRARKYFVSTKRTNNTQEVDHTIKDHVKGPGLKSYDVHLRQFNHKKALDDVMNAQKMQYQPELIVAVITDLLHRGSLGKALTGRHEAALVRFIDFICNHLGEVRFMRPLMMAASTVLDVFEQRLVAYSQKLMKALQRLSLAMQEEVRLTAELMRMKGAVDMLIGISMDNSEVAHKPTYVETKTPKMHPSVAAQNYVVLVE

SEQ ID NO: 228 - DNA, 1608 bp, Drosophila melanogaster
  CDS (1)..(1608): CT9947
atgcagaactcctttcttccactgaacacacggcgttttcgacagcgggcccaggtggaaacgccggatacggtgtactgggaccgactggcgaaaccagaactactcaaggagcacaacaccatcgattatttggacttcagtccaagcgatcctgacaactttgttgtgacctgttcggtgcgcgttcagatttacaacctggtgaccatgcttgtggtaaagaacctttcccgattccaaaagaccgcatacggcgccaccttccggcaggatggtcgactcctggccgccggcgacgaggagggccatgtcaagctattcgacaccaccagtcgcaacatcttgcgtttgttcaagggacacacggcaccagtacaccgcaccttctttacggcggacaagctgcagctagccagttttggagacgacaagtcggtccgtctgtgggacgtggcaaacgagaaggtggtgcaaacgtacgaggacacgcacaccgactacgttcgtgcaggcgccatgcatccgcaggcagggcatatgttcgtctccggcggctacgatggcaagatcaaactgtacgatacgagagcggaaacggcggtgcagcgcaccttagatcacggagctccggtggagtccatgttgttccttccgaacggctctattttcgtcagcgccggcggcagccaggtgcgcgtatgggatctcatcagcggctgccgtctgctcaccatgatgtcgcagcatcacaaaacagtaacttgtctgcgactgggatccgatggcaggagattgctctcaggcgggctcgataggcacgtgaaaatctacgatgtgagcacctacaaaacagtgcacacattgacttatcccaatgcggtggtcagcatggctgttgctgacggagatcaagcagttgtggctggaatggtcgatggtctagtctccattcgtcgcatgatggtagacagcaagcccagtcatttgaaaaagattcgtgcggatcgcgctcgaaagtacttcgtgagtacgaaacgcacgaacaacacccaagaggttgatcacaccatcaaggaccacgtcaaggggcctggattgaaatcctacgatgtgcacttgcgccagtttaaccacaagaaggctttggacgacgtgatgaatgcgcagaagatgcaataccagccggagctcattgtggctgtcatcacggaccttctgcaccgtggatcactgggaaaagccctcacgggtcgtcatgaggcagcgcttgtccgattcatcgacttcatttgcaaccacttgggcgaggtgcgattcatgcgcccgctgatgatggccgcgagcacggtccttgatgtcttcgagcaacgattggtggcctacagccagaagctgatgaaagccttgcaacgattgtcacttgcaatgcaggaggaggtgaggctcaccgccgagctgatgcggatgaagggtgctgtggatatgctcattgggatttcaatggacaatagcgaggtagcccataagcccacctatgtggagacaaagacacctaagatgcatccctccgtggcggcgcaaaattatgtggtcttagttgagtaa

SEQ ID NO: 229 - protein, 535 aa, Drosophila melanogaster
MQNSFLPLNTRRFRQRAQVETPDTVYWDRLAKPELLKEHNTIDYLDFSPSDPDNFVVTCSVRVQIYNLVTMLVVKNLSRFQKTAYGATFRQDGRLLAAGDEEGHVKLFDTTSRNILRLFKGHTAPVHRTFFTADKLQLASFGDDKSVRLWDVANEKVVQTYEDTHTDYVRAGAMHPQAGHMFVSGGYDGKIKLYDTRAETAVQRTLDHGAPVESMLFLPNGSIFVSAGGSQVRVWDLISGCRLLTMMSQHHKTVTCLRLGSDGRRLLSGGLDRHVKIYDVSTYKTVHTLTYPNAVVSMAVADGDQAVVAGMVDGLVSIRRMMVDSKPSHLKKIRADRARKYFVSTKRTNNTQEVDHTIKDHVKGPGLKSYDVHLRQFNHKKALDDVMNAQKMQYQPELIVAVITDLLHRGSLGKALTGRHEAALVRFIDFICNHLGEVRFMRPLMMAASTVLDVFEQRLVAYSQKLMKALQRLSLAMQEEVRLTAELMRMKGAVDMLIGISMDNSEVAHKPTYVETKTPKMHPSVAAQNYVVLVE

SEQ ID NO: 230 - DNA, 444 bp, Drosophila melanogaster
  CDS (1)..(444): CT10723
atggcagcttataccgaggatcagttggctgaattccaggaggccttcaacctgttcgacaaccgcggagatggcaaaattcagctgagccaggtgggcgagtgtctgagggccctgggccagaaccccaccgagtcggatgtcaagaagtgcacccaccagctgaagcccgacgagcgcatctcgttcgaggtgttcctgcccatctatcaggcgatctccaaggcccgctcgggcgatacggctgatgatttcatcgaaggactgcgtcacttcgacaaggacgccagcggttatatctcctccgccgagctgcgccacctgctgaccacgctgggcgagaagctcaccgacgaggaggtcgagcagctgctggccaacatggaggaccagcagggcaacatcaactacgaggagttcgtgcgcatggtcatgagcggttaa

SEQ ID NO: 231 - protein, 147 aa, Drosophila melanogaster
MAAYTEDQLAEFQEAFNLFDNRGDGKIQLSQVGECLRALGQNPTESDVKKCTHQLKPDERISFEVFLPIYQAISKARSGDTADDFIEGLRHFDKDASGYISSAELRHLLTTLGEKLTDEEVEQLLANMEDQQGNINYEEFVRMVMSG

SEQ ID NO: 232 - DNA, 1356 bp, Drosophila melanogaster
  CDS (1)..(1356): CT11063
atgttcaacgggatggtgagaaccatccgcgacagcgtcgtgggcacctatccgtcctgccacgtatcctcgcggctggaggagcgcagggccaagcagcgggcgatgcgacaggagcgtagacgaaaaccggacaaaccagacgactttgttacttacgaggattccggcagcgacgaggagacgccccaacagcaggaggaggtcctgaacacatcctacaacctgtgcgactacctgcgcagccgggagagtggactccgagatcgtcgcagtgtcaatgtggagtacaccagccgctatgtgctaacccacgacatgctgcgcgagacgcagattagtctgggctacatcaacaaggtcttctgctccaagtggctgagcagtcgacaagtggttttcgggaccaagtgcaataaactgctcgtctacgatgtgaacatgcgccgggtggacgccatcccaacgctctcaaatagccgggcaaaccatcctgaggtccagggtggcctgcatgccatcgagctgtcgcccagccgatccttcctagccaccggtgcgcgcaactcctccgatattgctgtttaccgactgcctacgctggatcccgtctgtgtgggcgagggtgggcaccgcgaccttataatgggcatgtgctggctggatgaccagtttcttgtgtccggatcgaaggactcgcgcatggctctgtggcgcatcaacgaggatcacatggagtttccagatggcggcgaggaagcgtgtcccacattcgcaaccatccacccccttagtgtcaaggaagttcgcactgcccagagggagtttaaggagatcgccgccctctcgctgaacggatacattcacatcttcaatgcggagaccttcaagcagacactctcacgaaagctgccaaactgccaggacaacgtgagcatcgcctaccacagcgacggcctttatgccgttggatgccgttcctataccatccttttggacgcccgaacccttcaaaccattaagaagatcacatctcgatacagtggctgcggtatacgggcgacttcgttcgaaggtaacctgctcaccgttggcacgggtctgggcatgctcctattctacgacattcgagccggaaagtatttggagagcagtgtgaatgcctcgcgcacagtcgcactcaagtgcagcaaaggaattgtgtatccggaggatgagatggatggcttccagcaggtgaagtatgtgcccgccatctacacccactgctatgacagcactaggatgcgcctcttcgctgcaggaggaccactgccggcgactttggtgggcaactatgcgggcgtttggcaataa

SEQ ID NO: 233 - protein, 451 aa, Drosophila melanogaster
MFNGMVRTIRDSVVGTYPSCHVSSRLEERRAKQRAMRQERRRKPDKPDDFVTYEDSGSDEETPQQQEEVLNTSYNLCDYLRSRESGLRDRRSVNVEYTSRYVLTHDMLRETQISLGYINKVFCSKWLSSRQVVFGTKCNKLLVYDVNMRRVDAIPTLSNSRANHPEVQGGLHAIELSPSRSFLATGARNSSDIAVYRLPTLDPVCVGEGGHRDLIMGMCWLDDQFLVSGSKDSRMALWRINEDHMEFPDGGEEACPTFATIHPLSVKEVRTAQREFKEIAALSLNGYIHIFNAETFKQTLSRKLPNCQDNVSIAYHSDGLYAVGCRSYTILLDARTLQTIKKITSRYSGCGIRATSFEGNLLTVGTGLGMLLFYDIRAGKYLESSVNASRTVALKCSKGIVYPEDEMDGFQQVKYVPAIYTHCYDSTRMRLFAAGGPLPATLVGNYAGVWQ

SEQ ID NO: 234 - DNA, 1797 bp, Drosophila melanogaster
  CDS (1)..(1797): CT11487
atgtcctcatccgatggaaaacttcgttacgatggccgtgtggcggtggtgacgggagctggtgccggtttgggccgcgagtacgcactgctcttcgcggagcgtggcgccaaggtggtggtcaacgatctgggtggcacccactccggcgatggagcatcgcagcgggccgccgacattgtggtggatgagatccgtaaggccggcggcgaggcggtggccgactacaactcggtaatcgatggggcaaaggtcatcgagacggccatcaaagctttcggacgcgtcgatatcctggtcaacaatgccggcattctacgcgacaggagtctggtgaagaccagcgaacaggactggaatctggtcaacgatgtccatctgaagggcagctttaagtgcacccaggcggcattcccgtacatgaagaagcagaactatggccgcatcatcatgacatcgtccaactcgggcatctatggtaatttcgggcaggtcaactacactgccgccaagatgggcctcatcggattggccaacacggttgccatcgagggagcccgcaacaatgttctttgcaacgtcatcgtgccaactgccgccagtcgaatgaccgagggcattctgcccgacattctcttcaacgagctgaagcccaagctgattgctcccgtagtggcctacttgtgccacgagtcctgcgaggataatggtagctatatcgagagtgccgccggctgggccaccaagctgcacatggttcgcggcaagggcgctgtgctgcgtccttcgctggacgaccccgtgaccattgagtacgtcaaggatgtgtggtcgaatgtgaccgacatgtccaaggccaagcacttgggtgccatcgcagaggcctccggcaccctgctggaagtgcttgagaagctcaaggaaggcggcggcgacgccatcgaggatgccttcgagttcaatagcaaagagcttattacctacgccctgggcattggggcatccgtcaaaaacgcgaaggacatgcgcttcctgtacgaaaacgatgccgatttcgccgccattccaactttcttcgttctgcccggccttctgctgcaaatgtccaccgacaagctgctcagcaaggctttgcccaacagccaagtggacttcagcaacattctgcacggcgaacagtacctagagatcgttgacgatctgcccaccagtggcactttgctgaccaacggcaaggtcttcgatgttatggacaagggatccggcgccgtggtcgtcaccaatagcgagtcgttcgacgaaagtggccgcctgttggtgcgcaaccagagcaccactttcattgtcggcgctggcaaattcggaggcaagaaggatcccatcgctggtgtagttccgctgcagccggcgcccaatcgccaaccggacgcaaccgtccagtatacgaccagcgaggaccaggcggcgctgtaccgtctgtccggcgacaagaaccccctgcatatcgatccccagatggccctgctggccggcttcaagacacccatcctccatggactctgcacactgggcttctcggtgcgcgccgtgctcgctcagtttgcggacaacaacccggctctgttcaaggctgtcaaagtgcgcttctccggacccgtaattccgggccagactttgcgcgtggacttgtggaagcagggcacacgcatcaacttccgcaccgtggtcgtggagaccggcaaggaggtcatatccggcgcctatgtcgacctgaagagctcacaggccaagctgtaa

SEQ ID NO: 235 - protein, 598 aa, Drosophila melanogaster
MSSSDGKLRYDGRVAVVTGAGAGLGREYALLFAERGAKVVVNDLGGTHSGDGASQRAADIVVDEIRKAGGEAVADYNSVIDGAKVIETAIKAFGRVDILVNNAGILRDRSLVKTSEQDWNLVNDVHLKGSFKCTQAAFPYMKKQNYGRIIMTSSNSGIYGNFGQVNYTAAKMGLIGLANTVAIEGARNNVLCNVIVPTAASRMTEGILPDILFNELKPKLIAPVVAYLCHESCEDNGSYIESAAGWATKLHMVRGKGAVLRPSLDDPVTIEYVKDVWSNVTDMSKAKHLGAIAEASGTLLEVLEKLKEGGGDAIEDAFEFNSKELITYALGIGASVKNAKDMRFLYENDADFAAIPTFFVLPGLLLQMSTDKLLSKALPNSQVDFSNILHGEQYLEIVDDLPTSGTLLTNGKVFDVMDKGSGAVVVTNSESFDESGRLLVRNQSTTFIVGAGKFGGKKDPIAGVVPLQPAPNRQPDATVQYTTSEDQAALYRLSGDKNPLHIDPQMALLAGFKTPILHGLCTLGFSVRAVLAQFADNNPALFKAVKVRFSGPVIPGQTLRVDLWKQGTRINFRTVVVETGKEVISGAYVDLKSSQAKL

SEQ ID NO: 236 - DNA, 465 bp, Drosophila melanogaster
  CDS (1)..(465): CT11597
atggcgacggcagtgccgcattgtcccccgaaacaggaccttccaccgccgggcggctacaagaagataccctttgcccgcgtgccaccgaagagctacttcacaggcttcaccaccatcggcacctatgtggttgtgacagccgttggcctgggcatctactacttgaccgccaagaaggtgaagcgcgacgagatcgagatgcgttccgcccagaatgtcatctttcccattttggtcgccgagcgggatcgcgaattcctgcgccagttgcgacgcaatcgggacgaggaggccgagctgatgaagaacgtgcccggctgggaggtgggcacctggtatggtgagcccgttttcaagaccctgcccgaggataccctggtcacgcccattttcaaggagttctacgcccactccgactggaagtcgtacgccaagcgtgcccacttgaagctctggtcctaa

SEQ ID NO: 237 - protein, 154 aa, Drosophila melanogaster
MATAVPHCPPKQDLPPPGGYKKIPFARVPPKSYFTGFTTIGTYVVVTAVGLGIYYLTAKKVKRDEIEMRSAQNVIFPILVAERDREFLRQLRRNRDEEAELMKNVPGWEVGTWYGEPVFKTLPEDTLVTPIFKEFYAHSDWKSYAKRAHLKLWS

SEQ ID NO: 238 - DNA, 1173 bp, Drosophila melanogaster
  CDS (1)..(1173): CT11623
atgccggacaatctgcgggtgaaagccttatccgagtaccgaaagaagttgctagagcacaaggaaatcgagggacgcctcaaagaaaagcgcgaggagatcaaggatctgaccaagctgtacgacaagtcggagaacgatctaaaggccctgcagagcgtgggacagatcgttggtgaggtgctgaagcagctgaccgaggataaattcattgtgaaggccaccaatggaccccgctacgtggtcggctgccgccggcagctggacaaagccaagctgaagtccggaactcgtgtggccctcgacatgaccacactgaccattatgcgctacttgccgcgcgaggtggacccactggtgtacaatatgtcgcacgaggctcccggggatgtcacctactcggccatcggcggcctaaccgaccaaattcgcgagctgcgcgaagtgatcgagctgcccctactgaatccggagctcttcctgcgcgtcggcatcacgccaccgaagggttgtttgctgtacggacctcctggcaccggcaagaccctgctggcccgtgcagtggcctcccagctggacgccaacttcctcaaggtcgtgtcctcggcgattgtcgacaagtatattggcgagagtgcgcgtctcattcgcgagatgttcaactatgcccgcgaccatcagccctgcatcattttcatggacgaaatcgacgctatcggtggtcggcgcttctccgagggcacctctgccgatcgcgagatccagcgcaccctgatggagctgctcaaccagatggacggcttcgattcgcttggccaagtcaagatgatcatggcaaccaatcgtccggacaccctcgatcctgcccttttgcgtccgggtcgcttggacaggaagatcgagattccgctgcccaacgagcaggctaggttggaaattctcaagattcacgcactgaagatcgccaagcacggcgaaatcgactacgaggccattgtcaagctgtcggacaactttaatggcgctgatttgcgtaatgtctgcacggaggcgggtttttttgccattcgtgcggagcgggagtacgtcatccaggaggacttcatgaaggcggtgcgcaaggtgtcggacaacaagaagttggagagcaagctggactacaagcccgtttag

SEQ ID NO: 239 - protein, 390 aa, Drosophila melanogaster
MPDNLRVKALSEYRKKLLEHKEIEGRLKEKREEIKDLTKLYDKSENDLKALQSVGQIVGEVLKQLTEDKFIVKATNGPRYVVGCRRQLDKAKLKSGTRVALDMTTLTIMRYLPREVDPLVYNMSHEAPGDVTYSAIGGLTDQIRELREVIELPLLNPELFLRVGITPPKGCLLYGPPGTGKTLLARAVASQLDANFLKVVSSAIVDKYIGESARLIREMFNYARDHQPCIIFMDEIDAIGGRRFSEGTSADREIQRTLMELLNQMDGFDSLGQVKMIMATNRPDTLDPALLRPGRLDRKIEIPLPNEQARLEILKIHALKIAKHGEIDYEAIVKLSDNFNGADLRNVCTEAGFFAIRAEREYVIQEDFMKAVRKVSDNKKLESKLDYKPV

SEQ ID NO: 240 - DNA, 336 bp, Drosophila melanogaster
  CDS (1)..(336): CT11966
atgtcgaactatattgccagaaagggacccgcagttctctcaaatctgggcagatgggcctacaatctctccggattcaaccaatacggtctgcatcgcgatgattgtctgtatgagaacgaggatgtgaaggaggccgtgcgccgattgcccaggaagctgtacgatgagcgtaactaccgcatcatgagggccctccatctgtccatgaccaagaccattctgcccaaggagcagtggaccaagtacgaggaggacgtcaagtatctggaaccctacctcaaggaggtcgtgaaggagcgcgaggagcgtgaggactgggaaaagatccactaa

SEQ ID NO: 241 - protein, 111 aa, Drosophila melanogaster
MSNYIARKGPAVLSNLGRWAYNLSGFNQYGLHRDDCLYENEDVKEAVRRLPRKLYDERNYRIMRALHLSMTKTILPKEQWTKYEEDVKYLEPYLKEVVKEREEREDWEKIH

SEQ ID NO: 242 - DNA, 2136 bp, Drosophila melanogaster
  CDS (1)..(2136): CT12417
atggaaatgaaaatggcagaggcccaggaaaccaaggactcttgctcgacgatcgaaggccagctgccagctggacctgttcgtgctgaagatgaggaggaagaagtggaggtcgaacaagagcagcaggagctgctaagcgaacggtggtcgccgttgggagccaactacgatgacgcgaatagcgccagttctggcgtggattgcgaactagaaccaggactggaaaagtcagaagcgcgacgtggaagcactggcagcgaactggcccgtctgcgaagcatagaggaggagcaggagcttctgacaagttctctgctggctttgacctcccactttgctcacgtccagcttagagtccgccaaatcgtggaggcgccagcggaggagcgggatcaacttttacgcgacctcgaggacttcgccttccaaggaattccagacgcagtccagtccaaggaatcccatccagataagcccgcaagcgatggtgaaaaggaccatggtcctgatagccagctcatccaacaactgaagtcccagctgactgagctggaacaaatagcctacgaggctggcgaacctggcatcctgccgcagcacgtattgctcgagaagcaaaagtttatcctggacgagctgcgcgccaagctcaatctccaggtagagcagcacgaactgccggcccttagcacggaacaactgcgccaccaggtcgacaatgccatcggcgagtttgtgggccctctgaagatgaaggagcaactggtggcccaactgaagacgcagataactgacttggagcgcttcattgccttccttcagtgcgatgccattgagggatccgttggggatcgactgaagcttctatccggtgcgtacaacagctacgctgcaaagcagacagcacggagttcacaggcaagttacgttgccacaaacgctccagctacgacagctactaccccgccatcctcgggattgggtgcccattcttccggcgagagcttgcacagcaaggcacatggcttgctggacaaggcttcggtcctcatgcaaatgttcgccagcacgcatctggtgaaaccacgaactcacgacgaattccagcaaaattcgctgaagaagacgcacaagggcaaccactggggggatctacgtgcccagcttgaggtggacatccaggaagtagctgcactggccgccactttgagctgcgaccgcgagaagttggccaacatcaagagagctttgcgcaaacagcaacaacaggcggagtcaaccgaattctccgacactggcaatccggttattaactcacaaaacggagcactgaccctgccgcctcgttgccggcgagcagtgccaactggtcacgaactggctccatatgcgtccgggggcgccatatcctccgactccgacgaagacattagctactccaacttcgagtgggaaaaggagagcaagagccggcggacgacgcatgcacgcggtgattccattgccactattggcagggaattgactacggttgtgcggaagaactttgcccgcacattgcagcagcttatacaacacggacttcgcataccagcggaatcggctgcctccagtttgatggttcccttcatgaggtgcctgcaccctgggcctccggtagtgccgcccgccgtcggaggagactcgcagttcctcggcttgggcagggccatgcacgcctgggaactagtactagcctattataggttgaaacacggcgaggagtacaacaacacgcctgccagaaagttgtcgcagagcttccagctggacatcgtggacgcgcaggctgtgaccgccaagcaaagtttgctcagcgccgtgggcatgattctggcaatgcatcgtccatacaaacggagtaacaacgcgcactttaaagccttcgtctgcgccggactcaattcccatttgctggtggagtggctgaacctgatcctcagctgccatgaactggtggacacgtactactcagcagacagctacgtggcccgcaccggattccgcgactcactgcgctccatcgatgctctttctcgatttgacttcgacctgccggtggacctggccatccggcacttccgcaacatctaa

SEQ ID NO: 243 - protein, 711 aa, Drosophila melanogaster
MEMKMAEAQETKDSCSTIEGQLPAGPVRAEDEEEEVEVEQEQQELLSERWSPLGANYDDANSASSGVDCELEPGLEKSEARRGSTGSELARLRSIEEEQELLTSSLLALTSHFAHVQLRVRQIVEAPAEERDQLLRDLEDFAFQGIPDAVQSKESHPDKPASDGEKDHGPDSQLIQQLKSQLTELEQIAYEAGEPGILPQHVLLEKQKFILDELRAKLNLQVEQHELPALSTEQLRHQVDNAIGEFVGPLKMKEQLVAQLKTQITDLERFIAFLQCDAIEGSVGDRLKLLSGAYNSYAAKQTARSSQASYVATNAPATTATTPPSSGLGAHSSGESLHSKAHGLLDKASVLMQMFASTHLVKPRTHDEFQQNSLKKTHKGNHWGDLRAQLEVDIQEVAALAATLSCDREKLANIKRALRKQQQQAESTEFSDTGNPVINSQNGALTLPPRCRRAVPTGHELAPYASGGAISSDSDEDISYSNFEWEKESKSRRTTHARGDSIATIGRELTTVVRKNFARTLQQLIQHGLRIPAESAASSLMVPFMRCLHPGPPVVPPAVGGDSQFLGLGRAMHAWELVLAYYRLKHGEEYNNTPARKLSQSFQLDIVDAQAVTAKQSLLSAVGMILAMHRPYKRSNNAHFKAFVCAGLNSHLLVEWLNLILSCHELVDTYYSADSYVARTGFRDSLRSIDALSRFDFDLPVDLAIRHFRNI

SEQ ID NO: 244 - DNA, 1230 bp, Drosophila melanogaster
  CDS (1)..(1230): CT12443
atgcctaagaatggcgatgccggcaaccggagcggttccgggacaaccagcgacggctgcatctatccggacgacgtcataatgggcgtgggtgttgcattcaacgtgcggtacacgggatgcgttgaggtcaagacctcaatgaaatccctggacttcgagacccgtacgcagttagcgcgagagtgcatcaatcgagtttgcgaggcggccggtttaaagtctgctggcaagcggagattaaccaacttcatatcggatcgacccagcatgcagcacgccggcaccaacatcatcattaatgtatcgagccgtgctctgtcgctaagcaacgtggaaacgggcgaggttatagccaatcacaatatgccgcgcatatcgttcgcgtccggcggtgacaatgacaccctcgacttcctcgcctacatagccaagaatgaggatgaatggcgggcatgttatgtcctggaatgcgctggcggccaaagcgaggatctaatagtgaccattggcaaggcgtttgccttgcgcttcaacgctctcagtaggctcaatgatccctcggcggattgtaacatcaatcaaagctgcaaggagaatgtgaaggagtactacaacgatttgccaaacaagctgccaccagaagtgccggaaccacaacaacagcaggtgcagcaacctctccatccgcatgcgcctcgtgtggcacaactgaatctgaagaagcctcgcgatcgcctgagcagcaacctcatcgacctcaactccccgcctcccgatcagacgaccaataagttaggccactttgatcccctccaagcgaccacagctgccaattctgttttgccctctgttcgcgatgtgttcgacggaccgcaatgcccgctcacagcggaggtgtggttccatgcgggcatatccagaccaatatcggagcgtttgctgcagcaggacggcgactttctggtgcgcgagtcacagggaaagcggggccagtacgtactaaccggattagagggcaagacgcccaagcatctgcttctcatcgatcccgagggcgtggtccgaaccaaagatcgcatcttcgacagcattagccatctgatcaactaccactgggcacacgcgctgcccatcatttcggaggattccgagctggtcttgcgtaatccggtgcgaagaccccagcaggatcaggctgcgtcgcccattacatcagcatcttcctaa

SEQ ID NO: 245 - protein, 409 aa, Drosophila melanogaster
MPKNGDAGNRSGSGTTSDGCIYPDDVIMGVGVAFNVRYTGCVEVKTSMKSLDFETRTQLARECINRVCEAAGLKSAGKRRLTNFISDRPSMQHAGTNIIINVSSRALSLSNVETGEVIANHNMPRISFASGGDNDTLDFLAYIAKNEDEWRACYVLECAGGQSEDLIVTIGKAFALRFNALSRLNDPSADCNINQSCKENVKEYYNDLPNKLPPEVPEPQQQQVQQPLHPHAPRVAQLNLKKPRDRLSSNLIDLNSPPPDQTTNKLGHFDPLQATTAANSVLPSVRDVFDGPQCPLTAEVWFHAGISRPISERLLQQDGDFLVRESQGKRGQYVLTGLEGKTPKHLLLIDPEGVVRTKDRIFDSISHLINYHWAHALPIISEDSELVLRNPVRRPQQDQAASPITSASS

SEQ ID NO: 246 - DNA, 1440 bp, Drosophila melanogaster
  CDS (1)..(1440): CT12517
atgacgcgacccaaacaggatggcggcaagttcaaggctttcatgcaggagaatgtccttaccatggccaccgttatcggtgtgttcgtgggtggactcatcggcttcattatcaaaaatagcactggcgaatggtcgaagagagagatcatgtacatatcctttcccggcgaaatttttttgcgaatgcttaaatgtttgattgtgccgcttttggtctcatcaatcaccagtgccattggtggactcgatctgagcatgtccagcaagattgctaccagagccattacttactactttgtgaccaccatatcggccgtgattctgggaatatgtctggtgaccacactgcgtcccggccagggagccaagatcgtggagacccagacggagagcattgataaggcatcgaaggtgctcaccccagacacgcttatggatttggtgcgaaacatgttcacggacaacatcattcagtcgaccatgttccagcaccgcactgagatctatgagaacactagcattagcccagcacagcctatggaaaactgggagttcaagtcggctcagcgcgagggttctaatgtcctgggtcttgtgatgttcagtgttatcctaggtaccaccattggaagaatgcgggagaagggacaacttctgcaggatttcttcaccacactgagcgaggcaatgatgaccatcacctcatgggttatttggatttccccgctgggtgttgccttcctgatagccgccaagattattgagatggaatcgatagcagcaacgattcagtcattaggatggtatttcataacggtcatgataggtctattccttcacggttttggtacgattgcggtgatctttttcctgggcacccgacgtctcccgtaccgctatattgccaagcttagtcaggtcctggcaactgcatttggaacaggttccagctcggccaccatgccgctgaccatcaagtgcttggacaacatgggcatcgatccgcgggtcactcgttttgtcattcccgtgggtgccactattaacatggacggaacggctctctatgaggctgtggctgctctgttcatcgcccaataccgtgagatgagctattccttcggcaccattgtggccgtcagcataacagccacggcggcatcgattggagctgctggaatcccgcaggctggacttgttaccatggtcatggtgctggacacagtgggcttggagccgaaggatgtgtccctcatcatagccgtcgattggctactggatcgcttccgcaccaccattaatgtaatgtgcgatgctctaggcactattttggttaaccatctgtcgaagaatgatttggccagcgtggataggctgaatgccgagccccatgagctcctcgagctgggacccaatggacacgagatgaaggaatga

SEQ ID NO: 247 - protein, 479 aa, Drosophila melanogaster
MTRPKQDGGKFKAFMQENVLTMATVIGVFVGGLIGFIIKNSTGEWSKREIMYISFPGEIFLRMLKCLIVPLLVSSITSAIGGLDLSMSSKIATRAITYYFVTTISAVILGICLVTTLRPGQGAKIVETQTESIDKASKVLTPDTLMDLVRNMFTDNIIQSTMFQHRTEIYENTSISPAQPMENWEFKSAQREGSNVLGLVMFSVILGTTIGRMREKGQLLQDFFTTLSEAMMTITSWVIWISPLGVAFLIAAKIIEMESIAATIQSLGWYFITVMIGLFLHGFGTIAVIFFLGTRRLPYRYIAKLSQVLATAFGTGSSSATMPLTIKCLDNMGIDPRVTRFVIPVGATINMDGTALYEAVAALFIAQYREMSYSFGTIVAVSITATAASIGAAGIPQAGLVTMVMVLDTVGLEPKDVSLIIAVDWLLDRFRTTINVMCDALGTILVNHLSKNDLASVDRLNAEPHELLELGPNGHEMKE

SEQ ID NO: 248 - DNA, 1395 bp, Drosophila melanogaster
  CDS (1)..(1395): CT12871
atgtcgctctatcgcatttccgcacggaaattgtccgaggcacagaaactgccaaatgtgggagcctatgttcgcatgatcgccgccgatggcaagagcctgcgcgacgtgctggccgccaaggtgccccaggagcaggagcgcgtaaagaacttccgcaagcagcatggcgccaccaagatgggcgagacgaccatcgacatgatgtacggcggcatgcgcggcatcaaggccctggtcaccgagacctcggtgctggatgctgacgagggtatccgcttccgcggcctctccattcccgagtgccaaaaggttctgccagccgccgatggcggcactgagcccctgcccgagggtctcttctggctgctgttgaccggcgaggtgcccaccaagtcccaggtgcagcagctgtcccgcgaatgggccgagcgcgccgccctgccccagcacgtggtcaccatgttgaacaacatgcccaccaccctgcacccgatgtcgcagtttgctgccgccgtcactgcgctgaatcacgacagcaaattcgccaaggcatactcggatggtgtgcacaagagcaagtactgggagtacgtctacgaggacagcatggacctgatcgccaagctcccagtggtggcggccaccatctactgcaacacctatcgcggcggcaagggctcccgttcgattgactccagcctggattggtcggcgaactttgtgaagatgctcggctacgacaacgcccccttcaccgagctgatgcgtctctatctgaccatccacagtgaccacgagggtggcaacgtgtctgcccacaccgttcacttggtgggctccgccctcagcgatccctacctctcctttgccgccggcctgaacggtctggctggtcccctgcacggcctggccaaccaggaggtgctcgtgtggctgcgcaagctgcagaaggaggccggcaacaacccgtcggaggagcagctcaaggagtacatctggaagaccctcaagtccggacaggtggttcccggctacggacacgccgtgctccgcaagaccgatccccgctacacctgccagcgtgagttcgcgctgaagcacctgcccgaggacgagacgttccagctggtgtcgaagatctacaaggtggtgccaccaattctgaccgagaccggcaaggtgaagaacccctggcccaatgtagatgcccattccggtgtgctgctgcagtactacggcatgaaggagatgaactactacaccgtgttgttcggcgtttcccgtgccctcggcgtgctggcctccctcgtctgggatcgcgccctcggcctgcccatcgagcgccccaagtcattctccaccgatctgctggtcaaaatggtccagaagtaa

SEQ ID NO: 249 - protein, 464 aa, Drosophila melanogaster
MSLYRISARKLSEAQKLPNVGAYVRMIAADGKSLRDVLAAKVPQEQERVKNFRKQHGATKMGETTIDMMYGGMRGIKALVTETSVLDADEGIRFRGLSIPECQKVLPAADGGTEPLPEGLFWLLLTGEVPTKSQVQQLSREWAERAALPQHVVTMLNNMPTTLHPMSQFAAAVTALNHDSKFAKAYSDGVHKSKYWEYVYEDSMDLIAKLPVVAATIYCNTYRGGKGSRSIDSSLDWSANFVKMLGYDNAPFTELMRLYLTIHSDHEGGNVSAHTVHLVGSALSDPYLSFAAGLNGLAGPLHGLANQEVLVWLRKLQKEAGNNPSEEQLKEYIWKTLKSGQVVPGYGHAVLRKTDPRYTCQREFALKHLPEDETFQLVSKIYKVVPPILTETGKVKNPWPNVDAHSGVLLQYYGMKEMNYYTVLFGVSRALGVLASLVWDRALGLPIERPKSFSTDLLVKMVQK

SEQ ID NO: 250 - DNA, 1122 bp, Drosophila melanogaster
  CDS (1)..(1122): CT12909
atgagtatgtcgcgcggcggcaacacaactctggacttgcagccgctcctggcggagagcgatgtcggaaacagggagctggaggagaagatgggcggatcggcggatcggtcatcgctgctcgatggatccggttcgaaggagctgagtcaccgggaacgcgaggactcggcgttgttcgtcaagaagatcgggagcgccttgttctatggcttgtcctccttcatgattacggtggtaaacaagacggtgcttacctcctaccacttcccctcgttcctgttcctcagcctcgggcaacttactgctagcattgtggtcctgggcatgggcaagcgcctgaaattggtgaactttccccctctgcagaggaataccttcgccaagatctttccgctgccactgatatttctgggaaacatgatgtttggactgggtggcacaaaaaccttgagtctgcccatgttcgcagccctacgacgcttctctatcctgatgaccatgctgctggagctcaagatcctgggactgcgaccttcgaatgcggttcaggtcagcgtatacgcaatgatcggtggagcgctgctggccgcctctgatgatctgtccttcaacatgaggggctacatctatgtgatgatcactaacgccttgaccgcctcgaatggcgtatatgtgaagaaaaaactcgacacctcggagatcggaaagtacggcctaatgtactacaactcgctgtttatgtttctgcctgccctggccctcaactatgttacagggaatctagatcaggcgctgaactttgaacaatggaatgactcagtgtttgtggtgcagttcctgctcagttgcgttatgggtttcatcctatcgtacagcaccatcctgtgcacgcaattcaactcggcgctgaccaccaccattgtgggatgcctgaaaaacatctgcgtaacatatctgggcatgttcattggaggcgactacgtcttctcgtggctcaactgtattgggatcaacatcagcgtgctggctagtctgctctacacgtacgtcacttttcggcggaagcgggctcccgataagcaggaccacttgcccagcacccgcggcgagaatgtctaa

SEQ ID NO: 251 - protein, 373 aa, Drosophila melanogaster
MSMSRGGNTTLDLQPLLAESDVGNRELEEKMGGSADRSSLLDGSGSKELSHREREDSALFVKKIGSALFYGLSSFMITVVNKTVLTSYHFPSFLFLSLGQLTASIVVLGMGKRLKLVNFPPLQRNTFAKIFPLPLIFLGNMMFGLGGTKTLSLPMFAALRRFSILMTMLLELKILGLRPSNAVQVSVYAMIGGALLAASDDLSFNMRGYIYVMITNALTASNGVYVKKKLDTSEIGKYGLMYYNSLFMFLPALALNYVTGNLDQALNFEQWNDSVFVVQFLLSCVMGFILSYSTILCTQFNSALTTTIVGCLKNICVTYLGMFIGGDYVFSWLNCIGINISVLASLLYTYVTFRRKRAPDKQDHLPSTRGENV

SEQ ID NO: 252 - DNA, 870 bp, Drosophila melanogaster
  CDS (1)..(870): CT13223
atgtggtggaccatcacaggaaactttggcaacattctgcccatcgactggtccaagtcgtacacccgtcagatgcacatgcccacactgaatctgggccagaaccacacgaagcagcagcagcagaatcgcaaccagcagcagcagttgcacaaccagagccatcaggcgtatccacacaccaacggtttgggatccggatccggatccggcctggatgcccagactccgggcgatgagttcaacgatctgaccagtgaggacgaggcggtggccaacgatttggacatgcacgccctcatccttaacggcttgaacggtgacatggacgaccagccgattaagacggtagaggaggtgatcaaggagatcgacgacatcatggacgaggccgagagcccgctggacgagccggagacctgcgattcggaggtgatcgagaaggcgcgagaggtgctgggcgcccccctctatgcggaaaaactgcaatatctgaccacgacacagctgaacgagctgtacatggagatggaggtgctgatccaggagctgagcgagacgttgatcaacgagctggccctgcgcgacgagctggagttcgagaaggagctgaagaactcgttcatctctctgctcctcgccgttcagaacaaaaggcggcagtaccatgtggagaagaagcgcggcaagttccagggtcccgagcccaagtacttgaccacagtcattccgtatcacctggagaacggcacgcccaacaatcagtctctgcaggtcctgatcaagattctcaaggccatcaacgaggacagcccgacggttccggccctccttacggactacatcctgaaggtgctctgccctacataa

SEQ ID NO: 253 - protein, 289 aa, Drosophila melanogaster
MWWTITGNFGNILPIDWSKSYTRQMHMPTLNLGQNHTKQQQQNRNQQQQLHNQSHQAYPHTNGLGSGSGSGLDAQTPGDEFNDLTSEDEAVANDLDMHALILNGLNGDMDDQPIKTVEEVIKEIDDIMDEAESPLDEPETCDSEVIEKAREVLGAPLYAEKLQYLTTTQLNELYMEMEVLIQELSETLINELALRDELEFEKELKNSFISLLLAVQNKRRQYHVEKKRGKFQGPEPKYLTTVIPYHLENGTPNNQSLQVLIKILKAINEDSPTVPALLTDYILKVLCPT

SEQ ID NO: 254 - DNA, 10410 bp, Drosophila melanogaster
  CDS (1)..(10410): CT4722
atggctccaaagtttttcggatgctgcaaatacttctccttaaaggtctccttctcgccggcttccagcatgtccgcgtatcagcaacgcctgccatcaaatgcagcatccattcacagcccccactggtcttacagggccctcgagcagcagcagcagtatgcgaagcaggcggctcatctgcagcagcagcagcaccagtcgcaccaacagcagcagcagcagcaacaggaccaacgcaccaacctgcatctgcaaatccatcaccaccaccaacagcagcagcagcagcagcagcagcagcaacaacaacagcaacagcagcaacagcagcagcagcaaaaacagcagcaacatcatatgcagcagcagcagcagcaacaacctttgtcaccacctcacccacccggcagcagcagcaacagtagtagtgcagcagcggcagcagcagcagcggcagcggctgcggcggccgtcaatcctggttacccgccatcatccgcagcagcggcggcagttaactccggttacccgccacggcccccgcagcatcgttttatccagaacacgggctatagcattgccccggcgcctacctaccgagataatccctactcgcgccacacccaaattcagcagcagcagcagcagcagcagcagcaacaacagcagcagcagcaacagcagcagcaacaacaacagcaggctgcagcgtcgatgcccgaatatcagagggcagcagctcgagcggctgtggcggcggtatcggcgggtaaaggcaacgtttctggccaaagttcgaacagcagcagcagtagcagcggaggtggaggaggaggaggaagtgctggcggatcagctccacccggcggcggtgttgtccaggtatcgcagtccggcggagtgctggtcatggaggccatgccccactatgccagtcaaccaaatagtaatccctcccagcagcagcaacagcagcagcagcagcagcaaggcggcaatcccagtggcgcgggtgcaacatctggtgctggcggcggtggaggcggcagcggtggcagcgtaatggtcgggagtctggggcgcatcctgatgccccatccacaggctctgcaatacaccagcgagtacctgaccaatgccacagcggccgttgctgcggcgatggtcaaccagcgacagcatttgcagctgcaacagcagcagcagcagcaacatccgcctgagccatttggcggccagcagccgtacaagaagcaacggcttagcgaggccaatgccaataatatgaatcacctgccaccacacccgcagcagcaacaccagcagcagcagcagcagcagcagcaacatcagcgatcctcaccagcgcaagtgcaacagcaacagcagcaacagatgaatagcagtcggcagagtcacaatgatatgtgccgacaagtggtcaccacgccaatgggcatgcagctcaaggtggagacgctgccacagcagcaacagaagcagcagcagcaccaacagcagcagcagcagcagcagcagggccgatctcagccagtggtgagcagcatgtccaccgtggtgagccaaccagtgggcacggttaccgttaccacggcgggattatcggcgagccacagcggcagcagtggcaatgttgccgccggattgggtacgggaaatacgggatccgccagcaccgaggcctatcatcctcaggtggaggccatttcgccgacattgcccagcgatagttcgattgaggagcgcggaaggaccagcgccaaagaggatcttctcatgcaaatccaaaaggttgacaatgagatcaaatccgctgagacgacaatggaaacgttgcgcaaaaaggagaaatccctcatggaggaggccgccctggccaaagagcagagggccgccaaagagttgaacgataacaacaatgatcaggaaccgatggtggaactatcgtggcgcagccaaatgctagcggagaagatctatgcggccaatcggaagacggcccaagcgcaacattccatgctgcagaatgcagcggccgatgaatcgtctccgggttccgttgccggcagaccatggttgccattgtataaccagccactcgatgtcgaggcacttgccatgctaatacgccagcatcagagtcaaattcgtgcgccgctacttttgcacatacgaaaattgaaggccgaacgctgggcgcacaatcagggactggtggagaagtacaccaaggatcaggcggattggcagcgacgatgcgagcgtatggaggccagtgccaagaggaaagcacgcgaggcaaaaaatcgcgaattcttcgaaaaggtcttcacggagctaaggaaacagcgcgaggataaggaacgtttcaatcgcgtcggttcgcggattaaatccgaagcggatctcgaggagatcatggatggcctgcaggagcaggcgttggaggataaaaagatgcgatcctatgcggttataccgcctctgatgcacgatgcccgccagaggcgatgcgcctatcataatgaaaatggacttatcgaggatatggtggcagttcatcaacagcgtaaggccctcaacatgtggaccgccggcgagaaggagacctttaaggagaagtatttgcagcatccgaaaaactttggagccattgcggctagtttggatcgcaaatcgccacaggattgcgttcgctactactacctcagcaagaagaccgagaattacaagcagctgcttcgaaaatcccgccaacggacgcgcagttcgcgtaatccagccaaggctcaggccgcacagccgcagtgcattatcgattcgatgaccactggcgttatgacgcgattgcagcgcgaacagcaacaaaagtccggcggtcgttcatccgccgttgctgagcgtgagcgtgcggaacgtgccgccgagcgtgagcgtgtggcagagaaagcggcagctgatgctgccaaagcggctgaaagtgccgccgaaaaggcaagcgccgccactaaggctgtcgaagcaacggctgccggtgaaaaggtggccaaagcggctgcagcagcggcggcggcagcagcaactaccgccacaaccgcaacaacaaccacatcatcatcaacatcatcatcatcatcatcagcatcatcagcatcaacagcatcatcatcgacggcaagtccagcgacattggcaggaatagccgcagataaaacggatgccggcaaaacggctagcgccagcgataagaatgcagcaacagctggtggaccaacggcaacgggaactccgacagcagcaactacacctgcaacagcaacagcaccaccagagatctcagcgggcggcgaggccaagagcaaaaatgccgaggaggaggcagctgccacagccggagcagcaacggtggccactgccggtacaccggcaaccggagcaagtgcggccagtgctggcgaggcgacaacggcaacgggcgccacggcgacagctgccgccaagggtgttggcaaaccggaaacagcgactgagccagcgggaacggctgctaagggagctgactctcggccagatgccaacgatccgctggccaaaactgcttcgaaggctatcaatgccgagggctataatgctatcggtggcaacagcagcagcagcagcagcaatgcaacgggcgcctctgctccagtgcagggcgttaccttgaatggctttaagcctggctatcaaaccgtggtcatggccaatgtaaaggcatccacgggtggcgatgattctggtgcgaacgctggtggagcagcacccggatcgttagcagcaacgaatgcatcgattgcgacgagtggcgataaaatcgtcaagacaacgccatcatccagggcgccaaattctacatcttcaacggcggcgaatgagagtagtagtggtgccggagtgaatacctatggccacaccgcaacaacggcgggcaattatcttggacagaagctgaaggctgcccaagttgagggtttgggagctggcaatgaattgcattcggatgttagtgaatccaagaggaaacgattcgaactgaattccggtgaggcaggtggaaatgcaacgtcagctatgaccaatagcagcaccagtggcagcatgaacatcagcaatagtcacggattgaaggccaatgccaaggatggatcgatgatggccaaaacatcgatggcatccacatcgtcggcatcggttgttgtcacatctacgccatcggcatcctcatcgtcattgtcatccgcgtcgtccatgctgttgataagtgccgcatccgtaatgtccacggcagcgggtgcaacgtcctcgtccacggcgacaacaacggccacagcttcggcgatctcgttgccgctattggcggatggcagtggcaactcgatggtcaatgcaaacgagattctcgccctcgatggcaaagacaaattggccagctgctttgtgtgcaaggcggaggcgtgtccccgcacccgtccactaaagaaggggcgtggccagcagtatggcattccggacgaaacaataccggcgggtgcccgcgtctgcaatagctgtcaatgcaaatcggtgcgcagccgctatccaaattgtccgctacccacatgcccaaatcccaaggatcgagcccagcgtctgcggaacattccctcccgtctcttcgaactggcgcccgaggtgcgtgatccgttgatggccgaatttcaaataccaccgcatgcaacacgctgctgttcggcctgcctaatgcgcattcgtcgcaagctcgatccgcagctgaatctcaccgatggctccagtggcggtgccggcagcggcagtggcggcgatgagacggatgtcagtacctcgtcgtgtgatgaacgagagccgggcggatccgataccgcttccgttgagagtccggagaatttgcagcggcacaagtcccttacgatggtcaaacagcaacagcaacagcagcaacagcagcagcagcaacaacagcagcagcagcagcaacagcaacagcaactatcgcagccacagccacctccgccagctccgcagcagcagaagggttcgtctggacgaggtggtgatcagggtacaccactgattatcacaccaacccgaatgagcagcaagtcgggatcgggcggtgcgcaaacagcgggcgacaatgaacgcctactgccacccgccgctggccaggcacccaagaagcaaaagaccagcgaggaatacgattcctcggccacggaaacggcggatgaggagaacgaaaactcgccggccaatcgtcagagtcccaaggtactattccatggccatggacatggacatggtggtcatgccaataatgtggctggtctgcagccgccggtggccaatatggggacgggtggtggtgttcaaccaggtggagctgctgggcaacaggtcaacggaccgattagtatgcgacgcgaggcggtcaacaatgttcaggattgcgtattctcggtaattgagcgttcgctgaagcacaagggtccgcaaccgaagggcggacagggtcagcagcagggtcaggggcaaggacagggccagggtcagggtcagactccaggtcaaagccagtccccatcccagcagcaacagcagcagcagcagcagcaatctgccaataatctggaacgcaaggagcttaccattgtaagggaataccgccaggatccgggtatactgaagcagcagcagcagcagcagcaggctggcggagcaccgcccacctcggctgccggtagtttgccgcatggcacctccgtacagaagctaacaacccggccagctgcagtggcaccaccgccaccggctcatccactgacacccaccagcattggatgtgcgggcagcaacaacggaaccagcgatagcctagccaccttatcggtggtcaattcgcacatgggcatggtgggaattggtcatccgggcccgatggcccacgcaagttccgccggaggaatcggtgtggacaaggcgaccataacgccggttgtcaagagctctagtggatcatcgaagagcggcggcggcagtgcgtccagtcactcgacagccacaccgccggagaccataatctacaatgtgccagtggcgcatccgcaacgtggtataccaccaccgtcgcagcactcggtacatccggcccatccgtcgcatacacagcacccggcccatccgcagcattcgtcgcatggtcagcatacgcagctgcaagtgccggaaccggagccgcaaacattggacttgagcatcaagaagccgccgcgcgatggtcactcgccgcacacgggagccggaggatctagctcgtctggctccggatcgggtggaccgtcctcatcggatcgacatcatggcccaccaccgccgaccatgtcgatgaagcacattgtacgctctggtggcatgtatcgcggtgacaccgtaactgttccatcgctggctgcacccagttcgtatctgtatcccacacggagtgtcaagtccattggcggcggtggcgtggtgcccggtgtgctgcccggtgtgcctggtattgcactatatctacaaccagtaccagtgcccgtacccatttccatttccggtcaaggccagttgccgccgaaagctggacaaccgccaccggcacagccgccatccggcaggggtgtggccaaggtgccacccaagctaagtccccagcaggcccatcacttgcatcccagtcacggacactcgccatcgcagcagcagcaacagcagcagcagcagcagcaacagcagcagcaacaggcggctgcagcacaacaacaattgctggtgaaaagcggctcgatcatccatggaacaccggccaatagtgcccagcaacagattatcgttcatgcaccagcgacggcagcagcagcaccctcctccctgttcagtcccaagttcgatggcttggtcaggcaaacgacaccagagggtgtgggttccgttggacccggaggagcaagtggcagtggcaagcatggctctataacgcaaggcacaccgttgcacatgccgccgcatcatttggagagcaaacggccatacgagagctactacaagagctcgcagcgtcacagtcccgcccaacagccgggtggcaatcagcaattgccgccgccgccgcagcaatcgtctccacaggcgccacctccgcagggctatggtgtcggtgtgagctcaccctatgcccgatcgccgttcgccggtgtggtggaacagccgcaggtgctgagcacgcgacaaattgtgatgcacgactacataacctcacagcagatgcagggacagcaacagcagcaacagcagcagcagcagcaacagcgcaacatgtcgcgcggcagcagtgccagtggcggtggaggtggcggtggttccgacaaggagtcaccatcgccacgaaacagtgtgggcagcgccagtggcttcgcctatggcggcgacaaggaatcggcaccgcgtggccgaccggagtactccagtcgtgcatcgccagccgatcatgtcaatagcactccgagtccgcatcgcacgccgccgccacagcgccaaggcgtcatccagaggcacaacacgggctccaagccaccatcaccggctgctccgccaccgagccggatgcacatgccgccgtatcaatatgcgccaagtggtcacgatgcattggcctcgtttgtggacgtggccgtgcagcagccgcagttaccggtgccgtcgcaaaaggatgacaagtcgccgggtccatcaacggcgccgggacaagtgcccggatctggtccaccacttggaccatcacctctgccgccacacgctgtggtcggcgtggcgcagccaccgccgccgaccgcacaccacgatcaacggtatcgcgatctgaccctgcatcaccatcatcatacactggtgcagcagcagattgcgcaacaacagcattatcgtagcctcaatgtggcggcccaggtcgatatgcagcggcagatggatcaggcgaaacgtgtgatgcgccaccagcagcaccaggtccagcagcagcagcagcagcaacagcagcagcagcacaaccatgccctggaacgggacagggagatgcaggaacggatgcgcgaacgggatcgtgagcgggaaagggaaagggagcgtgagcagcgggaacgagaacgtgaacgagaacgcgaacgtgaacgggagcgcgagcgacgtgaacaggatcgtgcgcggcgtgtggtggccgaagagcgggagcacgatagtcgacgcatggagcgcatgttcgccggcaatgtggtcactggatcaggtggcgccggcggcggaggaccgtcgcccggtcaatttctgcgggcttcggttccggaaactggtccaccacgctcaatcccagatcgcgaacgggaatcgtactatcgtcaggcacacggcggtccagctccagaggatacgcccgggcaactgagcgcccagagtctgatcgatgccattatcaagcatgagatcaatcgttccaatgatgccaccgctggcccgggtcgcgaatttccgcgcccatcgttcgttcatgctccgttgccgccacgtggttccggatcgggaggcggcaccggtacacgatcctcaccggccaatgtgctccatccgatgtacctgcgcgatctacgccagccgctcgatggcggagcgggatcaatgcttacggcggagaacaatggcaagcccagctcgtcgggatcgcccagtgtgattaatattgatttggatcaggagcgcatctcagcggcagccgcagcagttgcccaacagcagcagcagcagcaagctccgcctccgtcgcaatcgtcgcagtctagatccgtgcacggtcagctaaggacaccgacctcgcaatctggcggatcagcgcccagtccacagcagattcatacgaagagcattacctttggggaactaaccgattcgataattaccagtgactacggcaccaatcctcatctgcggccaccatatatggcctatttgcaggagacgcagtcaattctgccgccggatcgctggaagcagaaccgtcgtatgcaacagaaggccgaggaagcgaacgaccattcccagcagcagcagcagcagcaacaccagcagcaacatcacgcccagcagcagcagcagcagcagcagcaacaccatgcccagcaacatcatccgcagatgccgggcactggctctggctcggctccaggtggagctggtcagggcggtggatcgggcggcccgggtagcggtggtggtggcgccggcagagccagcacacctggcgaggatgggcgcaacataatccgaatgccacaggcggtcagtccgcgaaaatttaatcatgagatgatgctacatcatgtgatgggaacgacgggagcgggtggtgaagctggtcagttcttcctacccagccgtgtcgttctgcccgagcagagaggaacgcccagcggtggtggcggagcgcctggagccggaggtcctggatccggaggcggtgctaccaccattgaaaaatatgtaaagacccgcatcgctgaagtgatgcgcgatgatattggttatggaaagaatcggactgtcgaggtgcgaacagaggatgaagtaaccgccgatatggtggcacattcgcatgccgccgtccatgctgcacatgtggcgcacgcagcccatgtcgcccatgccgctgctatggaattgcagcacagaagcaaggaaccaccgccgccagagatcagtgtgtcacgtaagacgcccaaccaatacgaggtggtagatgccagtggtcggcgctcagctggcagtggttccgtttcggtttccgtttcgggcgccaatagccaccattcgccgtatcatccaccggcggcggcctatgcccccagcacctatgccttcccctacagcgccctgaatgtgcccggtgccgccggtggattgccaccgcaccagccgttgcagctagcccaccaggcggtggcaccacctggtgcctttgccaaggccaaggcagcccatgccctgagtgaactgggtgcagtcggtggtggggtgtcattggtggtgggcggcggctctggaggaattgcaggcggaccaggtggtgtctcagtcggtgtcggtgtaccgggcggcggcggaccaggaagcggtggcggcggcggtggcggtcacaattccagttcatcgcaagcatctgctgcggttgccgctgccgttgcagcggcggccagtgagtccaagccgctgctgttgtccaagtacgatgcactcagcgacgaagattag

SEQ ID NO: 255 - protein, 3469 aa, Drosophila melanogaster
MAPKFFGCCKYFSLKVSFSPASSMSAYQQRLPSNAASIHSPHWSYRALEQQQQYAKQAAHLQQQQHQSHQQQQQQQQDQRTNLHLQIHHHHQQQQQQQQQQQQQQQQQQQQQQQKQQQHHMQQQQQQQPLSPPHPPGSSSNSSSAAAAAAAAAAAAAAVNPGYPPSSAAAAAVNSGYPPRPPQHRFIQNTGYSIAPAPTYRDNPYSRHTQIQQQQQQQQQQQQQQQQQQQQQQQQAAASMPEYQRAAARAAVAAVSAGKGNVSGQSSNSSSSSSGGGGGGGSAGGSAPPGGGVVQVSQSGGVLVMEAMPHYASQPNSNPSQQQQQQQQQQQGGNPSGAGATSGAGGGGGGSGGSVMVGSLGRILMPHPQALQYTSEYLTNATAAVAAAMVNQRQHLQLQQQQQQQHPPEPFGGQQPYKKQRLSEANANNMNHLPPHPQQQHQQQQQQQQQHQRSSPAQVQQQQQQQMNSSRQSHNDMCRQVVTTPMGMQLKVETLPQQQQKQQQHQQQQQQQQQGRSQPVVSSMSTVVSQPVGTVTVTTAGLSASHSGSSGNVAAGLGTGNTGSASTEAYHPQVEAISPTLPSDSSIEERGRTSAKEDLLMQIQKVDNEIKSAETTMETLRKKEKSLMEEAALAKEQRAAKELNDNNNDQEPMVELSWRSQMLAEKIYAANRKTAQAQHSMLQNAAADESSPGSVAGRPWLPLYNQPLDVEALAMLIRQHQSQIRAPLLLHIRKLKAERWAHNQGLVEKYTKDQADWQRRCERMEASAKRKAREAKNREFFEKVFTELRKQREDKERFNRVGSRIKSEADLEEIMDGLQEQALEDKKMRSYAVIPPLMHDARQRRCAYHNENGLIEDMVAVHQQRKALNMWTAGEKETFKEKYLQHPKNFGAIAASLDRKSPQDCVRYYYLSKKTENYKQLLRKSRQRTRSSRNPAKAQAAQPQCIIDSMTTGVMTRLQREQQQKSGGRSSAVAERERAERAAERERVAEKAAADAAKAAESAAEKASAATKAVEATAAGEKVAKAAAAAAAAAATTATTATTTTSSSTSSSSSSASSASTASSSTASPATLAGIAADKTDAGKTASASDKNAATAGGPTATGTPTAATTPATATAPPEISAGGEAKSKNAEEEAAATAGAATVATAGTPATGASAASAGEATTATGATATAAAKGVGKPETATEPAGTAAKGADSRPDANDPLAKTASKAINAEGYNAIGGNSSSSSSNATGASAPVQGVTLNGFKPGYQTVVMANVKASTGGDDSGANAGGAAPGSLAATNASIATSGDKIVKTTPSSRAPNSTSSTAANESSSGAGVNTYGHTATTAGNYLGQKLKAAQVEGLGAGNELHSDVSESKRKRFELNSGEAGGNATSAMTNSSTSGSMNISNSHGLKANAKDGSMMAKTSMASTSSASVVVTSTPSASSSSLSSASSMLLISAASVMSTAAGATSSSTATTTATASAISLPLLADGSGNSMVNANEILALDGKDKLASCFVCKAEACPRTRPLKKGRGQQYGIPDETIPAGARVCNSCQCKSVRSRYPNCPLPTCPNPKDRAQRLRNIPSRLFELAPEVRDPLMAEFQIPPHATRCCSACLMRIRRKLDPQLNLTDGSSGGAGSGSGGDETDVSTSSCDEREPGGSDTASVESPENLQRHKSLTMVKQQQQQQQQQQQQQQQQQQQQQQQLSQPQPPPPAPQQQKGSSGRGGDQGTPLIITPTRMSSKSGSGGAQTAGDNERLLPPAAGQAPKKQKTSEEYDSSATETADEENENSPANRQSPKVLFHGHGHGHGGHANNVAGLQPPVANMGTGGGVQPGGAAGQQVNGPISMRREAVNNVQDCVFSVIERSLKHKGPQPKGGQGQQQGQGQGQGQGQGQTPGQSQSPSQQQQQQQQQQSANNLERKELTIVREYRQDPGILKQQQQQQQAGGAPPTSAAGSLPHGTSVQKLTTRPAAVAPPPPAHPLTPTSIGCAGSNNGTSDSLATLSVVNSHMGMVGIGHPGPMAHASSAGGIGVDKATITPVVKSSSGSSKSGGGSASSHSTATPPETIIYNVPVAHPQRGIPPPSQHSVHPAHPSHTQHPAHPQHSSHGQHTQLQVPEPEPQTLDLSIKKPPRDGHSPHTGAGGSSSSGSGSGGPSSSDRHHGPPPPTMSMKHIVRSGGMYRGDTVTVPSLAAPSSYLYPTRSVKSIGGGGVVPGVLPGVPGIALYLQPVPVPVPISISGQGQLPPKAGQPPPAQPPSGRGVAKVPPKLSPQQAHHLHPSHGHSPSQQQQQQQQQQQQQQQQAAAAQQQLLVKSGSIIHGTPANSAQQQIIVHAPATAAAAPSSLFSPKFDGLVRQTTPEGVGSVGPGGASGSGKHGSITQGTPLHMPPHHLESKRPYESYYKSSQRHSPAQQPGGNQQLPPPPQQSSPQAPPPQGYGVGVSSPYARSPFAGVVEQPQVLSTRQIVMHDYITSQQMQGQQQQQQQQQQQQRNMSRGSSASGGGGGGGSDKESPSPRNSVGSASGFAYGGDKESAPRGRPEYSSRASPADHVNSTPSPHRTPPPQRQGVIQRHNTGSKPPSPAAPPPSRMHMPPYQYAPSGHDALASFVDVAVQQPQLPVPSQKDDKSPGPSTAPGQVPGSGPPLGPSPLPPHAVVGVAQPPPPTAHHDQRYRDLTLHHHHHTLVQQQIAQQQHYRSLNVAAQVDMQRQMDQAKRVMRHQQHQVQQQQQQQQQQQHNHALERDREMQERMRERDREREREREREQRERERERERERERERERREQDRARRVVAEEREHDSRRMERMFAGNVVTGSGGAGGGGPSPGQFLRASVPETGPPRSIPDRERESYYRQAHGGPAPEDTPGQLSAQSLIDAIIKHEINRSNDATAGPGREFPRPSFVHAPLPPRGSGSGGGTGTRSSPANVLHPMYLRDLRQPLDGGAGSMLTAENNGKPSSSGSPSVINIDLDQERISAAAAAVAQQQQQQQAPPPSQSSQSRSVHGQLRTPTSQSGGSAPSPQQIHTKSITFGELTDSIITSDYGTNPHLRPPYMAYLQETQSILPPDRWKQNRRMQQKAEEANDHSQQQQQQQHQQQHHAQQQQQQQQQHHAQQHHPQMPGTGSGSAPGGAGQGGGSGGPGSGGGGAGRASTPGEDGRNIIRMPQAVSPRKFNHEMMLHHVMGTTGAGGEAGQFFLPSRVVLPEQRGTPSGGGGAPGAGGPGSGGGATTIEKYVKTRIAEVMRDDIGYGKNRTVEVRTEDEVTADMVAHSHAAVHAAHVAHAAHVAHAAAMELQHRSKEPPPPEISVSRKTPNQYEVVDASGRRSAGSGSVSVSVSGANSHHSPYHPPAAAYAPSTYAFPYSALNVPGAAGGLPPHQPLQLAHQAVAPPGAFAKAKAAHALSELGAVGGGVSLVVGGGSGGIAGGPGGVSVGVGVPGGGGPGSGGGGGGGHNSSSSQASAAVAAAVAAAASESKPLLLSKYDALSDED

SEQ ID NO: 256 - DNA, 1227 bp, Drosophila melanogaster
  CDS (1)..(1227): CT13458
atgacgaaaccctgggccgccattggaagtttgcgtctggcctcccaggagtttcgcgtggagagcgacacctttggcgaactgaaggtgcccgcggataagtactatggcgcccaaacgatgcgatcccagatcaatttccccatcggcggagccaccgaacggatgcccgccatgggcatcctgaagaaggccgccgccgaggtgaacaaggagttcggactggacagcaaggttagcgaggcgatctcgaaggcggccgacgatgtgatctctggcaagctatacgacgaccacttcccgctggtcatctggcagacgggctcgggcacgcagagcaacatgaatgtgaatgagtcggaggagttcaaggacattatcaagatcggacgcacgcatacgatggatgcggtgccattgacgctgggccaagagttcagcggctatgcccagcaattggcctacgcccaggagcgcatcgatgcctgtctgccgcgcgtctatgagctggctctgggcggcactgctgtgggtacgggtctgaacacacgcaagggattcgccgagaagtgcgctgcaaagatcgccgagctgaccagcctgcccttcgttaccgcgcccaacaagttcgaggcactggctgcccgcgatgccatggtggaggtgcatggtgtgctcaacacgatcgccgttagcctgatgaagattgccaacgatattcgtttccttggctccggaccgcgttgcggtttgggtgagctctcgctaccggagaacgagccaggtagctccatcatgcccggcaaggtgaatcccacgcaatgcgagtcgctgacaatgctctccgcccaggtgatgggcaatcaggtggcggtgaccatcggtggatccaatgggcacttcgagctgaatgtattcaagcccctgatcgtgtccaatgtgctgcgctccattcggctattgtctgatggcagcaggaccttcactgccaactgtgtgaatggcatccaggcgaaccgcgagaatattgccaagatcatgaacgagtcgctcatgctggtgaccgctctgaatccgcacattggttacgacaaggctgcgaaaattgcaaagacggcgcacaagaatggcaccacactcaaggaggaggccatcaatttgggttacctgacggagcagcagttcaacgactgggtgcgacccgaacagatgctgggacccaagtaa

SEQ ID NO: 257 - protein, 408 aa, Drosophila melanogaster
MTKPWAAIGSLRLASQEFRVESDTFGELKVPADKYYGAQTMRSQINFPIGGATERMPAMGILKKAAAEVNKEFGLDSKVSEAISKAADDVISGKLYDDHFPLVIWQTGSGTQSNMNVNESEEFKDIIKIGRTHTMDAVPLTLGQEFSGYAQQLAYAQERIDACLPRVYELALGGTAVGTGLNTRKGFAEKCAAKIAELTSLPFVTAPNKFEALAARDAMVEVHGVLNTIAVSLMKIANDIRFLGSGPRCGLGELSLPENEPGSSIMPGKVNPTQCESLTMLSAQVMGNQVAVTIGGSNGHFELNVFKPLIVSNVLRSIRLLSDGSRTFTANCVNGIQANRENIAKIMNESLMLVTALNPHIGYDKAAKIAKTAHKNGTTLKEEAINLGYLTEQQFNDWVRPEQMLGPK

SEQ ID NO: 258 - DNA, 2394 bp, Drosophila melanogaster
  CDS (1)..(2394): CT13690
atgcgccgccgcgccatgtcgcaccatcccaagcgactgccgcgcaagtaccgacaggcgcacaagtcccaaatgggcaaaagcggcaaccagccggtgaatgggaaacgaccatcgaggaagtaccgccggagacccaagaatctgatgcgtgagtacgtgcgccggcagaggcggcacgtctggctggagacgcacatctggcacgcgaagcgattccacatggttgaccgctggggccaccggttgccctacgccagctgcgacaagacctaccgcgcttgctatcgcgccagcgccgagcactgcctgctgcaggacatctcgttctatggttgcgtggagttgcggggacccttggacatgctacgcgagggattcgcccggctaacaagtccgcagtgtggccttgggatcacggcccggacttttctgagcggacgacgtgagggcagcgtggagttatttgaggatggccgctatccgtatggagccctgcagcgggccagttttatgtggcggccacggcgggaggaggaggatgagaaacagacgaatcacacgctctggctgtggctacatcccagtggcgctcaagctgttctaaatcagcttataagcgtgttccagctgaaatccacaaggcaacaaaagctgcctttaaacgaggctgtgactgaggaaaagatggatgtggataagattgagccagtcgagttgtccaaggaaacatcgcctggcaagaaaaactcgaagaagaagcctgaacagaggcccctgcgcttctggacaaaaacgaaagcattcgatccacagcctagctacttcaattccgacggcactctccacttggtactgctgcagcgggagtttaatcgtttccgtttgacagggcctagagcccaaaaagttctttttgccagcttacgtccgcatcgagaagaggagctccaggataaagccaactactgtcaggcagccttgcagctgagctcgcccgccgaactgctgtccaatctggtgatggcccaccttgtagtggatccgcgcctgcagcggcccaagaagcgtacgaaagcagtcggcaaaatggaacagccaccattatccgccggcgatcttctcatgaatcagccaaagagtctgccggagagtcctctgtggagcaagaaggcgagagagcggctggccaaaggcattatgtccgcgcacaagtacgaccagctgcgagaacaacatgccgttgtgccaggagctccatgtgccttcgaacagcaaatgcaggcgcttcccgtgatacttattcaaagaccaggatctcaggaccccagatacaagagattgggctacggctgcggctgggatgtgattgcaccggcaggatacggcatgaccctctggctaacactcaccatgtggggcgccagacccggcggattgagggaactggattcggtggctagggaggcaggtgccgaaatacatctgccagatacattagcgggagttcaaagagctgctgcttcggcggatgagctccgtgcccggtatttccgtatgccgcccaataagcgtaccaattaccgaaagttggccgtggtcagtccgtttactgcaccctggaggcatctagtgcgcgactggcgtgcatcattcagttctgcgagcgagggatcatcgttctatgtgctgcggcatcgccagcagctggaggagattgtcgagagtattcgacatcgtagcccactgccacagactctgcccgacgacgccatcatacagattcaacttcaattgctatcccgtggccatgtgaaggacaacgccctgatttgcttgcccacggcggcggatcacaagaagcgctggcgacagctaaagcacaacgaccaggcccccgttcacgtggagccaacgcaaccggacctgaatgaacagttgcgcaaggagctacgccagagtcacaagctaaagctgaagcgattgcgatcgagaagggtgcgtgagaagcggcgccttcaggagactgccaccaaacgtgtccacatacggccagcgaatacggctcatctcgtacgtggccaactacaggagatgtgccgcctgtggctgcccaccgatccggcggagctgcgggacagtgtgcgtcgccagtgtagtcgccaagtgtttggctacgtgagcacggccggcttcagcttcacggaggcactcgtctgtgcagtgggctatgtgacacccgccggcctgcagcagctcatcgaggagctcccagcatctaagggcaaccgcaaacagccgccgctaatgtgcctggtgcgcgatgcggatagccgcgactatcgctgggccagctttcaggtcaacctgaatgtggctagtccaaccttttga

SEQ ID NO: 259 - protein, 797 aa, Drosophila melanogaster
MRRRAMSHHPKRLPRKYRQAHKSQMGKSGNQPVNGKRPSRKYRRRPKNLMREYVRRQRRHVWLETHIWHAKRFHMVDRWGHRLPYASCDKTYRACYRASAEHCLLQDISFYGCVELRGPLDMLREGFARLTSPQCGLGITARTFLSGRREGSVELFEDGRYPYGALQRASFMWRPRREEEDEKQTNHTLWLWLHPSGAQAVLNQLISVFQLKSTRQQKLPLNEAVTEEKMDVDKIEPVELSKETSPGKKNSKKKPEQRPLRFWTKTKAFDPQPSYFNSDGTLHLVLLQREFNRFRLTGPRAQKVLFASLRPHREEELQDKANYCQAALQLSSPAELLSNLVMAHLVVDPRLQRPKKRTKAVGKMEQPPLSAGDLLMNQPKSLPESPLWSKKARERLAKGIMSAHKYDQLREQHAVVPGAPCAFEQQMQALPVILIQRPGSQDPRYKRLGYGCGWDVIAPAGYGMTLWLTLTMWGARPGGLRELDSVAREAGAEIHLPDTLAGVQRAAASADELRARYFRMPPNKRTNYRKLAVVSPFTAPWRHLVRDWRASFSSASEGSSFYVLRHRQQLEEIVESIRHRSPLPQTLPDDAIIQIQLQLLSRGHVKDNALICLPTAADHKKRWRQLKHNDQAPVHVEPTQPDLNEQLRKELRQSHKLKLKRLRSRRVREKRRLQETATKRVHIRPANTAHLVRGQLQEMCRLWLPTDPAELRDSVRRQCSRQVFGYVSTAGFSFTEALVCAVGYVTPAGLQQLIEELPASKGNRKQPPLMCLVRDADSRDYRWASFQVNLNVASPTF

SEQ ID NO: 260 - DNA, 1971 bp, Drosophila melanogaster
  CDS (1)..(1971): CT5938
atgaagttatgcatattactggccgtcgtggcctttgttggcctctcgctgggcgaggagaagaaggaaaaggacaaggagctgggcacagtgatcggcattgatttgggcaccacgtattcctgcgttggtgtgtacaagaacggacgcgttgagatcatcgccaacgatcagggtaaccgcatcactccctcctacgtcgctttcaccgctgacggtgagcgtctcattggagatgccgccaagaatcagttgaccaccaatcccgagaacacggtcttcgatgccaagcgtctgatcggtcgcgaatggtccgacaccaatgtgcaacacgacatcaagttcttcccattcaaggttgtcgagaagaactcgaagccccacatcagcgtggacacgtcacagggcgccaaggtgttcgcacccgaggagatctccgccatggttctgggcaagatgaaggaaaccgctgaagcttatctgggcaagaaggtcacccatgccgtcgttaccgtgccagcctacttcaacgatgcccagcgtcaggccaccaaggatgctggtgttattgccggtctgcaggtgatgcgcatcatcaacgaacccactgctgcggctattgcctacggtctggacaagaaggagggggagaagaacgtgcttgtgttcgatttgggcggcggcaccttcgatgtctccctgctgaccatcgataacggagtgttcgaggtggtggccaccaacggtgatactcatttgggaggtgaggacttcgatcagcgtgtgatggatcacttcatcaagctgtacaagaagaagaagggcaaggacattcgcaaggacaaccgcgctgttcagaagctgcgtcgtgaggttgagaaggccaagcgtgccctgtctggttcccaccaggtgcgcatcgaaattgaatccttcttcgagggcgatgacttctccgagaccctgacccgtgccaagttcgaggagctcaacctggatctattccgttccaccctgaagccagtgcagaaggtgctcgaggatgctgacatgaacaagaaggacgtgcacgaaattgtgctggtcggtggctccactcgtatccccaaggtgcagcagctggtcaaggacttcttcggcggcaaggaaccatcccgaggcatcaatcccgatgaggctgtggcctacggtgctgctgtgcaggctggcgtgctctctggcgaacaagataccgatgctattgtcctgctcgatgtgaacccactgaccatgggtattgagaccgtcggcggtgtgatgaccaagctgattccccgcaacaccgtcatccccaccaagaagtcgcaggtgttctccactgcctccgataaccagcacaccgtcaccatccaggtgtacgagggcgagcgtcccatgaccaaggacaaccatctgttgggcaagttcgatctgactggcatcccaccagcaccccgtggcattccccagattgaggtttcgttcgagatcgacgctaacgcgatcctgacggtcagtgccgaggacaagggtaccggtaacaaggaaaagatcgtcatcaccaacgaccagaaccgcctgacgcccgaggatatcgatcgcatgatccgcgatgccgagaagttcgccgatgaggacaagaagctgaaggagcgtgtcgagtcccgcaacgaactggaatcgtatgcctacagcctgaagaaccagatcggtgacaaggacaagctgggcgccaagctgagcgacgatgagaagaccaagctggagtcggccatcgatgagtcgatcaagtggctggaacagaatcccgatgccgatcccgaggagtacaagaagcagaagaaggatctggaggccatcgttcagcccgtgatcgctaagctgtaccagggtgctggcggtgctcctcctccagagggcggcgatgatgccgatctcaaggacgagctgtaa

SEQ ID NO: 261 - protein, 656 aa, Drosophila melanogaster
MKLCILLAVVAFVGLSLGEEKKEKDKELGTVIGIDLGTTYSCVGVYKNGRVEIIANDQGNRITPSYVAFTADGERLIGDAAKNQLTTNPENTVFDAKRLIGREWSDTNVQHDIKFFPFKVVEKNSKPHISVDTSQGAKVFAPEEISAMVLGKMKETAEAYLGKKVTHAVVTVPAYFNDAQRQATKDAGVIAGLQVMRIINEPTAAAIAYGLDKKEGEKNVLVFDLGGGTFDVSLLTIDNGVFEVVATNGDTHLGGEDFDQRVMDHFIKLYKKKKGKDIRKDNRAVQKLRREVEKAKRALSGSHQVRIEIESFFEGDDFSETLTRAKFEELNLDLFRSTLKPVQKVLEDADMNKKDVHEIVLVGGSTRIPKVQQLVKDFFGGKEPSRGINPDEAVAYGAAVQAGVLSGEQDTDAIVLLDVNPLTMGIETVGGVMTKLIPRNTVIPTKKSQVFSTASDNQHTVTIQVYEGERPMTKDNHLLGKFDLTGIPPAPRGIPQIEVSFEIDANAILTVSAEDKGTGNKEKIVITNDQNRLTPEDIDRMIRDAEKFADEDKKLKERVESRNELESYAYSLKNQIGDKDKLGAKLSDDEKTKLESAIDESIKWLEQNPDADPEEYKKQKKDLEAIVQPVIAKLYQGAGGAPPPEGGDDADLKDEL

SEQ ID NO: 262 - DNA, 1260 bp, Drosophila melanogaster
  CDS (1)..(1260): CT13852
atgagcggctccgaccaggagtacgatgacgaggagcgcgaaatactcgaagatctgcgcaagcagcgcaaaaagccacatgatcccgtccaggaagtgctcggtttcagtgatgatgacgacgacgacgacgacgacgacgaggaggagcagcaggatgtggcggaactgatgcgcgacagtgacatcgagggcgccgaagacgatgaccgcgatctgcccaacaccatggactggggcagcaaacggagcacgtactacaacaccgactttgtggaccaggactacagcagctacaatgcccaggaggaggagcaggcacgcgccgaggaggaggaggccaaaaagatccagctgcgtctggccaagcgcatgagcgaggccgatttccagctggacaatgtagaagcagcgcccgcaggcagcagtgatgacaacgagctgagccatataaccaaagtgaccagcgatctggccggcctatcagaacgcgagcgacgacagctgatgcacagtgagtcgccggagttcatcattctcacccaggattttcaacagcatctcgacgaggtgaagaacctattgaaaccggtgctcaactacgttcgcaaacacgatgtgcccatggtgccggcgctgcaatatgccggactctgccacaccgtgctcaccacctactgctccaatgtggctttctatctgctgctcaaggcacgtcgcatcgacgtcaaggcccatccggtgattaggcggctggtgcaactcaaggatctgatcgaggagcttaagccgcgctacgaggaatacattcgaccgcagctggaggcgctgctggagaggattgaagatggcgatgcattcaccgtgctggatgtggcacagcgcaaggctaagctgcagatactcaacaagtacaacgatggccagcaggcgtcagtgagctccgatgatgatgataatgatgacgatgacgatgctgagagtaaggagaaggatctgcaagaggaggctggtgaggaggaggaagaggaggatgcgcgacgcggcatcacctatcagatggccaagaacaagggcctcacgccgcaccgcaaaaaggagctgcgcaatccgcgcgttaagcatcgcggcaaataccgaaaggcgctcatccggcgcaagggagccgtgcgcacggtgcgcaaggagctgcagcgctacggcggcgaattgtccggcatcaaggccggcgtcacgaagagcgtcaagttccgcacctaa

SEQ ID NO: 263 - protein, 419 aa, Drosophila melanogaster
MSGSDQEYDDEEREILEDLRKQRKKPHDPVQEVLGFSDDDDDDDDDDEEEQQDVAELMRDSDIEGAEDDDRDLPNTMDWGSKRSTYYNTDFVDQDYSSYNAQEEEQARAEEEEAKKIQLRLAKRMSEADFQLDNVEAAPAGSSDDNELSHITKVTSDLAGLSERERRQLMHSESPEFIILTQDFQQHLDEVKNLLKPVLNYVRKHDVPMVPALQYAGLCHTVLTTYCSNVAFYLLLKARRIDVKAHPVIRRLVQLKDLIEELKPRYEEYIRPQLEALLERIEDGDAFTVLDVAQRKAKLQILNKYNDGQQASVSSDDDDNDDDDDAESKEKDLQEEAGEEEEEEDARRGITYQMAKNKGLTPHRKKELRNPRVKHRGKYRKALIRRKGAVRTVRKELQRYGGELSGIKAGVTKSVKFRT

SEQ ID NO: 264 - DNA, 1101 bp, Drosophila melanogaster
  CDS (1)..(1101): CT14019
atggcggcccagacgatactgtttgatttcacgctggacaaggacaagacggcggatgaggaggcgcgcctccaggtggccaaaatcctgcgtaacgagctggagcagctgttcccccagctggagctggcctactcgatggagtcgccggaaaacggctactttgcggtgctgcacgagaacaaggacacggtgattacctgccgcatcttccagcacggcctgctgacgctcaacgtggagtacttcctgcccgatggcaaggagccgagcatatccttcgacagcggtaagagcctggagaatgtcctggcaatcaaactgaaggccatcaaggcccagaagctgccgacgctgaagcgcggcgatgtctccaggtacttcccatcgtcagatgagcgcatcatcgagtacgacatcgacaaggtggtcttcgaggcgcgctcgcccttccagaagattcaaatcatgcactccaagaccctgggcaacatgctgctcctcgacgagctgcagaacattgctgaatccgatttgatttacacggagaccctgatgtgtcgcggcgtggagaactacgagggcaaggagatctgcatcctgggcggcggtgatggcgccttgttgtacgagctactcaaggagaatccgaagcatgtggtgatgctggagatcgatgagcttgtgatgcaaacctgcaacaaatacctcaacgtgatctgcggcgatgtgctggagaaacgcaagggcgatcagtacgagatcattgtgggcgactgtgtggagtacttgaagaagttcatcgccgagggccgcaagttcgactacgtttttggggatcttacggacatacccataaccgatgccccggagggcgagacctgggatttcattcgtaccatcttcgagcactccttcaaggtgctgaaacccgacggaaagtatttgactcatggcaatgggtccacctgcaaggtgcagctgcgtctattcgaggagcagttgaatttgctgcgtcccaaggtgaagttcaccaccaccaaggcgtttgtgccgtcgttcatggaagagtggctcttctaccaagtgactttcgcctaa

SEQ ID NO: 265 - protein, 366 aa, Drosophila melanogaster
MAAQTILFDFTLDKDKTADEEARLQVAKILRNELEQLFPQLELAYSMESPENGYFAVLHENKDTVITCRIFQHGLLTLNVEYFLPDGKEPSISFDSGKSLENVLAIKLKAIKAQKLPTLKRGDVSRYFPSSDERIIEYDIDKVVFEARSPFQKIQIMHSKTLGNMLLLDELQNIAESDLIYTETLMCRGVENYEGKEICILGGGDGALLYELLKENPKHVVMLEIDELVMQTCNKYLNVICGDVLEKRKGDQYEIIVGDCVEYLKKFIAEGRKFDYVFGDLTDIPITDAPEGETWDFIRTIFEHSFKVLKPDGKYLTHGNGSTCKVQLRLFEEQLNLLRPKVKFTTTKAFVPSFMEEWLFYQVTFA

SEQ ID NO: 266 - DNA, 1104 bp, Drosophila melanogaster
  CDS (1)..(1104): CT14119
atggcggcccagacgatactgtttgatttcacgctggacaaggacaagacggcggatgaggaggcgcgcctccaggtggccaaaatcctgcgtaacgagctggagcagctgttcccccagctggagctggcctactcgatggagtcgccggaaaacggctactttgcggtgctgcacgagaacaaggacacggtgattacctgccgcatcttccagcacggcctgctgacgctcaacgtggagtacttcctgcccgatggcaaggagccgagcatatccttcgacaccatgcgcaccatggaactgattttgcggcagaaatttgattccgatcggtccaagtacttgccgccgattaaacgcggcggatatatcgacatatatatgactagctcagatgagcgcatcatcgagtacgacatcgacaaggtggtcttcgaggcgcgctcgcccttccagaagattcaaatcatgcactccaagaccctgggcaacatgctgctcctcgacgagctgcagaacattgctgaatccgatttgatttacacggagaccctgatgtgtcgcggcgtggagaactacgagggcaaggagatctgcatcctgggcggcggtgatggcgccttgttgtacgagctactcaaggagaatccgaagcatgtggtgatgctggagatcgatgagcttgtgatgcaaacctgcaacaaatacctcaacgtgatctgcggcgatgtgctggagaaacgcaagggcgatcagtacgagatcattgtgggcgactgtgtggagtacttgaagaagttcatcgccgagggccgcaagttcgactacgtttttggggatcttacggacatacccataaccgatgccccggagggcgagacctgggatttcattcgtaccatcttcgagcactccttcaaggtgctgaaacccgacggaaagtatttgactcatggcaatgggtccacctgcaaggtgcagctgcgtctattcgaggagcagttgaatttgctgcgtcccaaggtgaagttcaccaccaccaaggcgtttgtgccgtcgttcatggaagagtggctcttctaccaagtgactttcgcctaa

SEQ ID NO: 267 - protein, 367 aa, Drosophila melanogaster
MAAQTILFDFTLDKDKTADEEARLQVAKILRNELEQLFPQLELAYSMESPENGYFAVLHENKDTVITCRIFQHGLLTLNVEYFLPDGKEPSISFDTMRTMELILRQKFDSDRSKYLPPIKRGGYIDIYMTSSDERIIEYDIDKVVFEARSPFQKIQIMHSKTLGNMLLLDELQNIAESDLIYTETLMCRGVENYEGKEICILGGGDGALLYELLKENPKHVVMLEIDELVMQTCNKYLNVICGDVLEKRKGDQYEIIVGDCVEYLKKFIAEGRKFDYVFGDLTDIPITDAPEGETWDFIRTIFEHSFKVLKPDGKYLTHGNGSTCKVQLRLFEEQLNLLRPKVKFTTTKAFVPSFMEEWLFYQVTFA

SEQ ID NO: 268 - DNA, 1362 bp, Drosophila melanogaster
  CDS (1)..(1362): CT13914
atgctaagccaattttactgcttgtttttgttgctcctccacttcttcgtgggcgtgacgttgtctgaagagggggagtgccgccgccttaatcgcgcagatatcgagggcagactgtccacaaagacgccctacagagcgatcgcaaattatgacgaaacgccaccgaaatacgccggctgccatccgacgcgaatttggaccatcatccgacacggaactagaaatcctagcgaatccgttatccttcaggcgcaaaatcgactatcagagataaagaaacgcattctggatcagacgaagccgccgatctgcaccgctgaattggaaaagctgcgccaatggcactggatgcatctgaatgccactgaagatgagaaattactggtggccgagggtgaggatgagctgattgagctggcggaacggatgcagcggcgatttccggatctacttccggagttgtacaatccggagtggtactacttcaagtatactgcgacccagagaacgctgaaaagtgcggaaagcttcgctacgggtttgttcggccgtcatcgcatccatactgtacgatatccgccgcctttgcacgaggatcctgttttgcggttctataagggctgtggaaagtggaaaactgacgtcgataagaatcccgaaaccttggtcaacgcacgcaggttccttgcagagccgcagatgcagtcagcagtggagcaggtacggagcagcacccggctaccagatcttcagccggaggacgttcagcttatgtacacggtgtgcgctttcgagacggcctggcatcgcccacgtcacgactccggctcgaaatcttcatacgaatccgtgtggtgtaacttctttgatgtggccgccatggaggcgctggaattcttcgaggatcttgagtactattggaacgatggctacggctacgaactgactcatcgcattgcctgtccagcaatcgcagatatgtttgcggccattagttcctctgaggagacacggcagcgacgggccaacgccacgctgtacttcacgcactcgggtacgcttctcaaattgctggcccacctgggattggcccgggacaataagccgctgacgcacaaacactttgccagcgagcgtctttggcgcacaagccagattgacgcgttcgcgaccaacttggccttcctacgttacgactgcgacaaggggaatccgcaagtcctggtgctgcaccaggagcgagtggtgcgcctgcccggctgcccgcaggacaaggatctctgtccgctggccacgctgcgtcggatttacgccaatagcgtggaccactgcgaccgcgagaagatgtgccgagtgtag

SEQ ID NO: 269 - protein, 453 aa, Drosophila melanogaster
MLSQFYCLFLLLLHFFVGVTLSEEGECRRLNRADIEGRLSTKTPYRAIANYDETPPKYAGCHPTRIWTIIRHGTRNPSESVILQAQNRLSEIKKRILDQTKPPICTAELEKLRQWHWMHLNATEDEKLLVAEGEDELIELAERMQRRFPDLLPELYNPEWYYFKYTATQRTLKSAESFATGLFGRHRIHTVRYPPPLHEDPVLRFYKGCGKWKTDVDKNPETLVNARRFLAEPQMQSAVEQVRSSTRLPDLQPEDVQLMYTVCAFETAWHRPRHDSGSKSSYESVWCNFFDVAAMEALEFFEDLEYYWNDGYGYELTHRIACPAIADMFAAISSSEETRQRRANATLYFTHSGTLLKLLAHLGLARDNKPLTHKHFASERLWRTSQIDAFATNLAFLRYDCDKGNPQVLVLHQERVVRLPGCPQDKDLCPLATLRRIYANSVDHCDREKMCRV

SEQ ID NO: 270 - DNA, 6267 bp, Drosophila melanogaster
  CDS (1)..(6267): CT14464
atggaggatgcacaggagcaaagggaatcctcgcaagccgaattggccaaaaagcatccgctgacgccgctcaaggagctgcctgaagaaagcgaggaggaggaggaggaagaggatgaatcctcggcgggagccctacgggagtctgacagcaacaactccatcatggggaagatgaagatgcgcgtgtccagcattctgcccgcctccttgagcggttggttttcgccgtcgtccaaagatgggaacgatgccttatcctccccagctaatctccgccagtcacagccacgccagtccaatggacgcctcactaccaagcggaaacgaggacgccgtcggataatgctagccgaagtggatgccgatgcagccgatgatcttgatgacggctccgatgccaaaggcctcaactatgaggaggtggccctggccgacaacatagccgaacacgacctggccgccgaggatgaacagacgcggcggagcgagtacaatgtgttcctgctgcgcaagcgagccggggctgttgcagctgccggcggtgacgaggatgaggccgaggaggatgaactggaagaggacgacgaggatggcgatgaggaggatgacgatgaagagcaggagaatctccaacagtccgccgccgtgcagaccaagcgtcgacgcctggagctggagacccccgtcaatttgccgaacatgcgtcgtctgccccttttgtcatccacgcctgctgctccgctcgcggctgccaccagctcctccagctcccagatgtacaagggcgtcagccacattgcgccacatcggcgcaatcacctcaatttgtatggtagtcaacggcagcgcgaacccgcgtacaactttttcacgggcaacgaagctgccgagggaagcaccggggatctgccacacagcatccgccgttcactgaacatacctttcggaggcagcagcaccgctaccagctacaacaacagcctatccagccttcctaaccacaagcgaccatcgctcataggcaagcaaacccatcgacgcgatcttaccatggatgagacggggactggcccggccatgagttcggaagaacatctcaatcatttgctgagaataagcaggaccaacaacaatactagcaacaataataataataataataacaacaacaatgtcattgagacaaaaacaagacgaagtgaactgtctgcggccgcaggaggttgcggtgattcgcagtccgagagcgatatgaacgaataccacgacaatggtgaagggcacgacggacttcgtccgtcgcattacaacagcaacagcaatttagaattttacggaaatctgcagagctccaagtcaatatttaacagaagcaacaccgccgcacagcaatcgcatcggaattctacgtggtcgctgaattcccttacccaacgacgtcgcttcaatgcgtccatatacggcagtacgtcggcactgagcgacagtcgtctgcttagtggcagtgcctctaactcaggctctgcatctgcctctagctcgcccttttaccagggacgcaccaccttcgggggcaattccggcaacaatcgcctcttcagtcgcagcaatcttagctcatccgccgcatcctcaatgttgggactcaattctgccggcagctcaccggcgcatcagctgcatgcttccatgactggtggtattggatacggtatgaaagcggtagatatgcgaccttcagactccggcagtcttgcggagacatctgtgggccaaggtggcagtaagaaacccggtaccgggctgtcgaacaccacgatgcgcattctcaacctacttgaaagctactccacgccattgatcgatgccaagcgaatggggagcagcatcaaggagcatcaaagcagtcgccaacagcgccagggtacgccagccaccccgtatctacgttccacgagtgccagccgcaatgtttcggtgcccaatcacatcaacgagttggcggaactgcgctctaacaaactgctggtgccgacgatgcagcagcttctggaacgtcgtcgtctacaccgcgttacacagaactctcgagatgtggttcacagccagaacgttcgtgctggtggggaaaacaaccaggagaagcccaagccaactgcaccatatgttgctccgatagaccagtcggctaaccatactcagcacacaaacaagatgcgttcgcgtctttcgcaccagacgcgcaacaaggagacacgcacggcggaagaggaagcacccccgccgctggatttgccacagatcagctttccggacatggcaagcgccccaaagtttgatttgataatcaaacccacggtgccagtggtatcaaaaccatctaccaccgacccaatccaaagtagcaaaagtagcaacaccaacctctctactacaaactccaagcagatgccaaacttcctggctaatccccagcctgcggcaccaattgttaacttcgctgccaatggaaacgtttctgcaatcagtaaaccaagtaaacgcacattcaccttctcagaacccacacctttgtcgaactttcaggagaactgcatccccaagccgaagatcaatcgcaaatacaccttctcggcaccggcaccactggatgatttgcgtataacgaacaaacagtcgcagccaaccataaacggaacgccgtcatccaaggagtgggagtgtgatacgtgtatggtgcgaaacaagcccgagatcaacaagtgtgtggcctgtgagacggccaagccggtagcatctgcggctcctgtccaagcaccattaccaccatctacagcagctattgacacacaaagtttcgttggttttggggatcgattcaagaaatcgacgactgcctgggagtgcgatgcctgcatgctgtccaataaggctgaagccagcaaatgcattgcctgcgagactccaaggaaaactgttgcaccaaaggtcaacaacttctcaccgttgattacaaatgcgaaaagcaacgagtgggagtgctctgtgtgtctggtgcgcaacaaagtcgaggtcagcaagtgtgtggcctgtgagtcggccaaaccaggcgcaactatggctctccctgcaacatctaatatagctgttgcgactccctctataattacggatggctttggggatcgattcaagaaatcagcgactgcctgggagtgcgatgcctgcatgctgtccaataaggctgaagccagcaaatgcattgcctgcgaaactccgcgaaaatcttcgactccaatagcgaacagtagttacccgtcgatcaacaataatttgccagccggatccggttttgatatttccttcacgcgaaaggcaaacatgtgggagtgccaaacatgcctggtgatgaacaagtcgagtgatgaggaatgcattgcctgtcaaacgccaaactcacaggcgagaaacagcaacagcgagtccgcactgatttcatccataagctcttcctcggcatcgttctccggatctttatccagaccctcatctagatcatcctctgggtcaacctcaacctgtgggtcagtttgttcgggatctatcgtcagcattagctccaccaccgaaagcgccaaagcattatcagcaaaaaaggtgccccccaagccggatgccggatttcagcagctagtggcagcccaaaaaacatcaacttgggaatgcgaagcatgcctggcaaagaatgatatgtcgcggaagacgtgtatctgctgtgaacagatgatgccggaagcatttaaccctgccgcaacaacggccaactccgcagccagttcggtgcccaaattccgttttggattttctcatgtaaaggaggttgtcaagccatctgtggaaacgacgaccacaccagcaccaacttccgctcaatttagcttcggtttcggccaaagcaatcagggtaaggatgtggcggacagcaagaagacggaggccccgaagacctttatgtttggcgtgagcaaagtggaagagcccaagacggtgagttttgggacaggcatcaaggaaacaacggccacatcgagcacagaagctacagctccaactccagctgcagcagcaccagcaccagtccagtttgtgttcaaggcaccgactaccgcaaccacggccagttcactcaccaccacaatcagcaccaccagcaacgctcctgctttgggtggcttcagctttggcgctccatcatcgtcctctacagtttccagttcgacgactagtaccagtgcgaatcccgcggctgtcaaaccgatgttcagctggtccggagctggcagtgccgtgagcagcaccagtagcagccagcagccagtggccaaggcgccaaccctaggttttggtgtttcctccagcaccgtaacaacgacaacaacctctacgaaagtttttgctttcacaccggcatctggtctagatccggcagcagccacctcggcaccagctgcaggtgccggcttcagttttggaagtcagtcaaagccagcaaccacacagaacactggaaccttcttctttggccagccaacagcggttgcgccagcaacgccaaccaaccctagcgtgagctccatcttcggagcaccggcaacaagtaccactgcaagcaccagcgtgagtgccaccaccagcaccagcaccgccaacgccattgcttccagctttgcgcccacctcgacccctcagctctttggcaattggggtgaaaagaaaacggacttgaccacctttggtgcttcttccggttcgggaacgactacaacgcctagcttcggctggtcgagcaatggagatgcggcaaagagcaacagcgctgcggtcggcagtgcggcggtgccttcgtcttcggcctccacgatggcgactccgatattcggcagcagttccatgtttggaccatccagtagcagtaacaacaccaccagcaccagcaccactagtctaccattcggatcagcggcgaccactgccgcaactacgccggcgggcggcaatgcagcccttactgggttattcggcaatgtgggcaactctctagcgggagtaggagctcctgtagccacaacaccagcggcaacagctgctgctccattgaccaacatctttggcaatcccacgccagttgctgctgccgcgcctgtcttcggcagcggaagcaccatcccaagcgcaggatttggagcgcctgctgcagctgctccgttggcggccccagcgttaccaggagcatttaactttggcggagcaactgcagccacgccagctgcctcaagtgctccatttgtattcggaagcagcaccaatgagccgctggccaaaccgtcgttcaacttcaccggctcggcggccagctcgactgctcctgcgccagccttcaatttcacggccaatacggcggccactaataatccctccggtggcgattcgcatccgcgcatcttccaattcggtagttcgcaaccggcggccaataaccagtttggtggtgcgggcggtgccaccaacaactccgccggcggtatgcccatgttcaacttttcgcccggggcgccgcagatgcagcttcaatccgccagctgcgggcaactcggcgcagagttcccagacggctcgccgcaaaatccgcgcccccgtacgccgtttgccgccccggtagaaatggcatcgcagtcggccatcacgatagcaaatgaggccgccgtcggattaggattaagatattggcagccattgccgagagtaacagaatcagcagtagcagcaaaagcatcaagggccgaaaaggaaaagcaagacacagaagacgccggcaacaatagtgggctcaaaggttcggtccagagccaatatcaccaggagccagatattcaaggatcatcgaggataaacatgcagtcaccaaagtcgccatgtgtgaacaaataccgcttcgtacgccgccacagcctgaactctgaaaccaggaaaccctttagcaggaatatttggcagaatacaacaggagaaggcaatgaaaccaatggcgacgatgtccctaaaacaccaacaactggcgaccaggaggacaaccaacaggaggaacgagattcagcggtatatacatcaacagaacgaactgtactagtaaggacccaattcaagatagtgcggcaaaggagcgtcatctcgaaaccgagacagaagcctccgacttactcttaa

SEQ ID NO: 271 - protein, 2088 aa, Drosophila melanogaster
MEDAQEQRESSQAELAKKHPLTPLKELPEESEEEEEEEDESSAGALRESDSNNSIMGKMKMRVSSILPASLSGWFSPSSKDGNDALSSPANLRQSQPRQSNGRLTTKRKRGRRRIMLAEVDADAADDLDDGSDAKGLNYEEVALADNIAEHDLAAEDEQTRRSEYNVFLLRKRAGAVAAAGGDEDEAEEDELEEDDEDGDEEDDDEEQENLQQSAAVQTKRRRLELETPVNLPNMRRLPLLSSTPAAPLAAATSSSSSQMYKGVSHIAPHRRNHLNLYGSQRQREPAYNFFTGNEAAEGSTGDLPHSIRRSLNIPFGGSSTATSYNNSLSSLPNHKRPSLIGKQTHRRDLTMDETGTGPAMSSEEHLNHLLRISRTNNNTSNNNNNNNNNNNVIETKTRRSELSAAAGGCGDSQSESDMNEYHDNGEGHDGLRPSHYNSNSNLEFYGNLQSSKSIFNRSNTAAQQSHRNSTWSLNSLTQRRRFNASIYGSTSALSDSRLLSGSASNSGSASASSSPFYQGRTTFGGNSGNNRLFSRSNLSSSAASSMLGLNSAGSSPAHQLHASMTGGIGYGMKAVDMRPSDSGSLAETSVGQGGSKKPGTGLSNTTMRILNLLESYSTPLIDAKRMGSSIKEHQSSRQQRQGTPATPYLRSTSASRNVSVPNHINELAELRSNKLLVPTMQQLLERRRLHRVTQNSRDVVHSQNVRAGGENNQEKPKPTAPYVAPIDQSANHTQHTNKMRSRLSHQTRNKETRTAEEEAPPPLDLPQISFPDMASAPKFDLIIKPTVPVVSKPSTTDPIQSSKSSNTNLSTTNSKQMPNFLANPQPAAPIVNFAANGNVSAISKPSKRTFTFSEPTPLSNFQENCIPKPKINRKYTFSAPAPLDDLRITNKQSQPTINGTPSSKEWECDTCMVRNKPEINKCVACETAKPVASAAPVQAPLPPSTAAIDTQSFVGFGDRFKKSTTAWECDACMLSNKAEASKCIACETPRKTVAPKVNNFSPLITNAKSNEWECSVCLVRNKVEVSKCVACESAKPGATMALPATSNIAVATPSIITDGFGDRFKKSATAWECDACMLSNKAEASKCIACETPRKSSTPIANSSYPSINNNLPAGSGFDISFTRKANMWECQTCLVMNKSSDEECIACQTPNSQARNSNSESALISSISSSSASFSGSLSRPSSRSSSGSTSTCGSVCSGSIVSISSTTESAKALSAKKVPPKPDAGFQQLVAAQKTSTWECEACLAKNDMSRKTCICCEQMMPEAFNPAATTANSAASSVPKFRFGFSHVKEVVKPSVETTTTPAPTSAQFSFGFGQSNQGKDVADSKKTEAPKTFMFGVSKVEEPKTVSFGTGIKETTATSSTEATAPTPAAAAPAPVQFVFKAPTTATTASSLTTTISTTSNAPALGGFSFGAPSSSSTVSSSTTSTSANPAAVKPMFSWSGAGSAVSSTSSSQQPVAKAPTLGFGVSSSTVTTTTTSTKVFAFTPASGLDPAAATSAPAAGAGFSFGSQSKPATTQNTGTFFFGQPTAVAPATPTNPSVSSIFGAPATSTTASTSVSATTSTSTANAIASSFAPTSTPQLFGNWGEKKTDLTTFGASSGSGTTTTPSFGWSSNGDAAKSNSAAVGSAAVPSSSASTMATPIFGSSSMFGPSSSSNNTTSTSTTSLPFGSAATTAATTPAGGNAALTGLFGNVGNSLAGVGAPVATTPAATAAAPLTNIFGNPTPVAAAAPVFGSGSTIPSAGFGAPAAAAPLAAPALPGAFNFGGATAATPAASSAPFVFGSSTNEPLAKPSFNFTGSAASSTAPAPAFNFTANTAATNNPSGGDSHPRIFQFGSSQPAANNQFGGAGGATNNSAGGMPMFNFSPGAPQMQLQSASCGQLGAEFPDGSPQNPRPRTPFAAPVEMASQSAITIANEAAVGLGLRYWQPLPRVTESAVAAKASRAEKEKQDTEDAGNNSGLKGSVQSQYHQEPDIQGSSRINMQSPKSPCVNKYRFVRRHSLNSETRKPFSRNIWQNTTGEGNETNGDDVPKTPTTGDQEDNQQEERDSAVYTSTERTVLVRTQFKIVRQRSVISKPRQKPPTYS

SEQ ID NO: 272 - DNA, 3288 bp, Drosophila melanogaster
  CDS (1)..(3288): CT14586
atgcgctttggcttaaagttgagctgcctttggccaagctttttattatggctaacatggagcagtggcggcggtggaggtagatgggtgggagtcagcgcacagccatcattaaccgagaaaatcccattaggtgccattttcgagcagggaaccgacgaggtgcaatcggccttcaaatacgcgatgctcaatcacaacctgaacgtctcatcccgtcgattcgagctgcaagcctacgtggatgtgatcaatacggcggatgcatttaaattgtcacgactgatttgcaatcagttctcaagaggcgtatactcgatgctgggagccgtttcgcccgactccttcgacacactgcactcctactcgaataccttccagatgcccttcgtgacgccctggttccccgagaaggtgcttacgccatcgtctggcttcctcgactttgccctcagcatgcgcccggattatcatcaggccatcattgatacaatacaattttatggctggcgcaaaataatttatctctacgattcccacgatggtctgctgcgcctacagcaaatataccagggcctgcggcccggcaacgagtccttccaagtggagctggtcaaacgcatctctaatgtcagcatggccatcgagttcctgcacacgctggagcagatcggccgattcgagaacaagcacatcgtcctggactgccccacggaaatggccaagcaaatactcatccaacatgtgcgtgatttgcgactgggccgtcgtacctaccactatttgctgagtggtttggtcatggacgatcgctgggagagcgagataatcgaatttggcgccattaacatcactggcttccgcatcgtggacacgaatcggcggctggtccgtgagttctacgacagctggaagcgcttggacccccagatgagtgtgggcgctggccgtgaatcgatttcggcccaggcggcgctcatgtacgatgccgttttcgtcctggtggaggctttcaacaaaatcctgcgcaagaagcccgaccagttccggaacaatgtgcagcgtcgcagtcagacgctgatggtggcccaggcggcggcctcaacgtccagcgatggctacaactacagcgccagcggtggaggtggtggcaatggtggtgccggcggtggatttgctggcagcgattccggaggatccggtggcatggcctcgcgagcactggactgcaatacggccaagggatgggtgaatgcctgggagcacggcgataaaatatcgcgttatttgagaaaggtggaaatcgagggcctaaccggggacatcaaattcaacgatgacggcagacgcgtcaattacacgctgcacgtcgtcgagatgacagtaaacagcgccatggtcaaggtggccgagtggaatgacgatgccggactgcagcccctaaatgccaagtacgtacgattgcgtccgcacgtggagtttgaaaagaaccggacctacatcgtgaccactgtcctggaggagccctacatcatgctgaagcaggtggccttcggtgagaagctgcacggcaacaatcgcttcgagggatactgcaaggacctggccgatttgctggccaaggagctgggcattaactacgagctgcgcctggtcaaggatggcaattacggctcggagaaatccagtgcccatggcggctgggacggaatggtgggtgagctggtgcgcaaggaagcggatattgcgattgccgccatgacgattaccgccgaacgcgaacgtgtcatcgacttcagcaagccgttcatgtcgctgggcatctccatcatgattaagaagccagtgaagcagacgcccggcgtgttcagcttcatgaatcctttatcacaggaaatttgggtgagcgtcatcttcagttacatcggcgttagcatcgtgctattctttgtgtcgcgcttctcgccacatgaatggcggctcgtgcaacagcagccgcagcaatcacagtcgccagatccgcatgcacatcacgaacagcttgccaatcagcagccgcccggcatcatcggaggtgcaccactgcccgctccaccgggaccacccacaccgggcgcccaaacggcagcaggagcagctgccttgcaagcggccctctccgccggaagtcccggatccggaggctcgtcctcggcggtggtgaacgagttcagcgtttggaactccttctggttctcgctggccgccttcatgcagcagggatgcgatctgtcgccgaggtcggtatccggacgaattgcagccgcctcgtggttcttcttcaccctgatactcatctcctcgtacacggccaacctggccgccttcctcaccgtggaacgaatggtcacgccgatcaattcaccggaggacctggccatgcagacggaggtgcagtacggcactctgctgcacggctccacatgggatttcttccggcgctcccaaatcggactacacaacaagatgtgggagtatatgaactcgcgcaagcacgtcttcgtgccaacctacgatgaggggattaaacgtgtgcgcaactccaagggcaagtacgccctcctggtggagtcgcccaaaaacgagtatgtgaacgcccgcgagccctgcgacacaatgaaagtgggccgcaatctggatacaaagggatttggcatcgctacgcccctcggctcggcgctcaaggaccccatcaatctggccgtgctgacgctaaaggaaaacggcgagctgatcaagttgcggaacaaatggtggtacgaaaaggcggaatgcagcacccacaaggacggtgagacatcgcatagcgaactatcgctgagcaatgtggccggtatattctacatcctgattggcggcctgctcgtcagcgtattcgtcgccattctggagtactgcttccgcagcagggactcgcgttccgcgtccagtggttccggcatgggcttgggcatgggactgggcggcggcatgagtggcggcagtctgggtaaggccaatgggtccatgatgttgggtccatcgagcgccgtgcccggcgggatgccgtcctcacatcaaaggagtacgctgacggacaccatgcatgccaaggcgaaattgactattcaagcgagtcgcgactatgacaacggacgcgttgggtatctcaattgcgcctcgttgcagtactatccgcccgcccagctctcggccacgccccccgacgccggggactccctgcacatgaacgcccacgggcaggtctga

SEQ ID NO: 273 - protein, 1095 aa, Drosophila melanogaster
MRFGLKLSCLWPSFLLWLTWSSGGGGGRWVGVSAQPSLTEKIPLGAIFEQGTDEVQSAFKYAMLNHNLNVSSRRFELQAYVDVINTADAFKLSRLICNQFSRGVYSMLGAVSPDSFDTLHSYSNTFQMPFVTPWFPEKVLTPSSGFLDFALSMRPDYHQAIIDTIQFYGWRKIIYLYDSHDGLLRLQQIYQGLRPGNESFQVELVKRISNVSMAIEFLHTLEQIGRFENKHIVLDCPTEMAKQILIQHVRDLRLGRRTYHYLLSGLVMDDRWESEIIEFGAINITGFRIVDTNRRLVREFYDSWKRLDPQMSVGAGRESISAQAALMYDAVFVLVEAFNKILRKKPDQFRNNVQRRSQTLMVAQAAASTSSDGYNYSASGGGGGNGGAGGGFAGSDSGGSGGMASRALDCNTAKGWVNAWEHGDKISRYLRKVEIEGLTGDIKFNDDGRRVNYTLHVVEMTVNSAMVKVAEWNDDAGLQPLNAKYVRLRPHVEFEKNRTYIVTTVLEEPYIMLKQVAFGEKLHGNNRFEGYCKDLADLLAKELGINYELRLVKDGNYGSEKSSAHGGWDGMVGELVRKEADIAIAAMTITAERERVIDFSKPFMSLGISIMIKKPVKQTPGVFSFMNPLSQEIWVSVIFSYIGVSIVLFFVSRFSPHEWRLVQQQPQQSQSPDPHAHHEQLANQQPPGIIGGAPLPAPPGPPTPGAQTAAGAAALQAALSAGSPGSGGSSSAVVNEFSVWNSFWFSLAAFMQQGCDLSPRSVSGRIAAASWFFFTLILISSYTANLAAFLTVERMVTPINSPEDLAMQTEVQYGTLLHGSTWDFFRRSQIGLHNKMWEYMNSRKHVFVPTYDEGIKRVRNSKGKYALLVESPKNEYVNAREPCDTMKVGRNLDTKGFGIATPLGSALKDPINLAVLTLKENGELIKLRNKWWYEKAECSTHKDGETSHSELSLSNVAGIFYILIGGLLVSVFVAILEYCFRSRDSRSASSGSGMGLGMGLGGGMSGGSLGKANGSMMLGPSSAVPGGMPSSHQRSTLTDTMHAKAKLTIQASRDYDNGRVGYLNCASLQYYPPAQLSATPPDAGDSLHMNAHGQV

SEQ ID NO: 274 - DNA, 1104 bp, Drosophila melanogaster
  CDS (1)..(1104): CT14874
atgtttgatgtctttgggtccgtcaagggcctgctgaagatcgaccaggtgtgcatcgacaacaatgtctttcgcatgcactacaaggccacggtgatcatactgatcgccttctccctcctggtgacctcgcgccaatacatcggtgaccccatcgattgtattgtggacgagatcccactgggcgtgatggacacctactgctggatctactctacgtttaccgtgccagagaggctaacgggcatcaccggacgcgatgtggtgcagcccggcgtgggctcccatgtggagggcgaggacgaggtgaagtaccacaagtactaccagtgggtgtgcttcgtcctcttcttccaggccatcctgttctacgtaccgcgctatctgtggaagtcctgggaaggcggacgcctcaagatgctggtcatggatctcaacagccctattgtgaacgatgagtgcaagaacgatcgcaaaaagatcctggtcgactacttcattggcaacctgaaccgccacaatttctacgccttccgattcttcgtgtgcgaagccctgaactttgtgaatgtgattggacagatctactttgtggacttcttcctcgacggcgagttcagcacctacggcagtgatgtcttgaagttcactgagctggagccggatgagcgcattgatcccatggcgcgggtctttccgaaggtcaccaaatgcacgttccacaaatacggtccatccggcagtgtgcagacccacgacggtctgtgcgtgctgcccctgaacattgtcaacgaaaagatctacgtgttcctgtggttctggttcatcatcctgagcatcatgtcgggaatatcgcttatctacagaatcgctgttgtggcgggtcccaagctccgccatctcctactccgagcccgttcccgtttggctgaaagcgaggaggtcgaactggtggccaacaagtgcaacatcggcgattggttcctgctctatcagctgggcaagaacatcgatccgctcatctacaaggaggtgatctcggacttgtcccgcgaaatgagcggcgatgagcatagcgcccacaagcggcccttcgacgcctaa

SEQ ID NO: 275 - protein, 367 aa, Drosophila melanogaster
MFDVFGSVKGLLKIDQVCIDNNVFRMHYKATVIILIAFSLLVTSRQYIGDPIDCIVDEIPLGVMDTYCWIYSTFTVPERLTGITGRDVVQPGVGSHVEGEDEVKYHKYYQWVCFVLFFQAILFYVPRYLWKSWEGGRLKMLVMDLNSPIVNDECKNDRKKILVDYFIGNLNRHNFYAFRFFVCEALNFVNVIGQIYFVDFFLDGEFSTYGSDVLKFTELEPDERIDPMARVFPKVTKCTFHKYGPSGSVQTHDGLCVLPLNIVNEKIYVFLWFWFIILSIMSGISLIYRIAVVAGPKLRHLLLRARSRLAESEEVELVANKCNIGDWFLLYQLGKNIDPLIYKEVISDLSREMSGDEHSAHKRPFDA

SEQ ID NO: 276 - DNA, 1881 bp, Drosophila melanogaster
  CDS (1)..(1881): CT15952
atggcggccaggagcgtgcggctagcgcagcttttgctatttaccctgctctgcggcttcgtcggcctgtcagccgccaagcacctggacctggatggtatccaccaccaccagcaccacctgcacagcgccaccacgcaccacagacgtcgcctacagcgggactcgcgggcgaaggacgccgttgggggatcgacccaccagtgtgatgccgtcaagagctacttcgaatcgatcgacatcaagtcgagtgggacttacagcgaaaaaggcgccatttgcggcggaaactgctgcaacaatgccacggagctggagctgcgggacaaagccgccggaatgttcgagcaactgcttcatcaccacaccagcagcctgcgcggagtcctcgagacgaatgccaaacagttccaaagtcacgtcctggaattggcgcagatttcggagaacatgacccactcgctcttttcgaaggtttatacccgtatggtgccttcatcgcgaatgatgatccatcaactgtacaccgaaatcatgaaccatctgatttacacctccaactatacgaacagcaatggccagctgggcaggcgaggaattggcagtgtccagagcaacttggaggaggctgtgaggcacttctttgttcagttgttccccgtggcctaccaccagatggtccatctgtccaagaacaatttgggtgacttgcacgaggactacgttaactgcctgcagcacaacttcgacgagatgcatccattcggggacattccccagcaagtgcagtccaacttgggcaagagtgtccatatgtccaatgtcttcatgaatgccctgctccaggccgccgaagtcctcagcgaagcggatgccctttatggcgaacaactgacggacacgtgcaagctgcatctcctcaagatgcactactgccccaactgcaatggacaccattcaagttctaggagcgaaacgaaattgtgctatggctactgcaagaacgtaatgcgcggctgctcggcggaatatgccggactactggacagtccctggtcaggtgtagtcgactccctgaacaatctggtcaccacccatattctctcggacactggcatcattaatgtcatcaaacacctgcagacttacttctctgaggcaatcatggctgccatgcacaatgggcctgaactggagaaaaaggtaaagaagacatgtggcacgcccagcctgacgccctattcgtccggagaaccggatgcgcggcctccgccccacaagaacaacgtaaagtgggccactgacccggatccgggcatggtcctcttcctgtccaccatcgacaagagcaaggagttctacacgaccatcgtggacaacttctgcgatgagcaacagcactctcgtgacgatcactcctgctggtcaggcgatcgtttcggggactacactcagctgctgattaatccgggcactgatagccagcgatataatcccgaggtgcccttcaatgcgaaggctcagaccggcaagctgaacgagctggtcgacaagctcttcaagattcgcaagagcattggagctgcggcaccttccaacagcatacaggcgacgcacgacatccagaatgatatgggtgagggctccggcggcggagagggtcagatcggcgacgatgaggaggagtatggaggcgcacatggttccggagatggttccggcgatggaccccatacgcccatcgaggaatccgaaggcaccaccactaacgaagtggagtcgcgtgacagcggcaagaccagtgggtccaacccactggaaggcaccgcgacgtggatgctcctcactctagtcacaatgctctttagtagctgtagttaa

SEQ ID NO: 277 - protein, 626 aa, Drosophila melanogaster
MAARSVRLAQLLLFTLLCGFVGLSAAKHLDLDGIHHHQHHLHSATTHHRRRLQRDSRAKDAVGGSTHQCDAVKSYFESIDIKSSGTYSEKGAICGGNCCNNATELELRDKAAGMFEQLLHHHTSSLRGVLETNAKQFQSHVLELAQISENMTHSLFSKVYTRMVPSSRMMIHQLYTEIMNHLIYTSNYTNSNGQLGRRGIGSVQSNLEEAVRHFFVQLFPVAYHQMVHLSKNNLGDLHEDYVNCLQHNFDEMHPFGDIPQQVQSNLGKSVHMSNVFMNALLQAAEVLSEADALYGEQLTDTCKLHLLKMHYCPNCNGHHSSSRSETKLCYGYCKNVMRGCSAEYAGLLDSPWSGVVDSLNNLVTTHILSDTGIINVIKHLQTYFSEAIMAAMHNGPELEKKVKKTCGTPSLTPYSSGEPDARPPPHKNNVKWATDPDPGMVLFLSTIDKSKEFYTTIVDNFCDEQQHSRDDHSCWSGDRFGDYTQLLINPGTDSQRYNPEVPFNAKAQTGKLNELVDKLFKIRKSIGAAAPSNSIQATHDIQNDMGEGSGGGEGQIGDDEEEYGGAHGSGDGSGDGPHTPIEESEGTTTNEVESRDSGKTSGSNPLEGTATWMLLTLVTMLFSSCS

SEQ ID NO: 278 - DNA, 1233 bp, Drosophila melanogaster
  CDS (1)..(1233): CT16489
atgacggtcaccacagcagcagcttcgaccatcagtggagccagtgggtccaccacgaataatggtcagtctggtggcggtgcacgcccactggagacgctaaacggaatgaccaggctgacccccgcccgcgacttgacccttggtgggcgcggcgctgggacagccagcaaaaaggtctttgctcccaatttgaatgctgtgcgcaataaaaatgccaatgtcaagacatccaaggacaccacgcagccaaggagcggccgcagaggtggacgtggcaacggcactggagcaacacgtggtcgaggtggaaattccgctggcgggggcaactccacgctcatccaaacccagggactcttctccgaaggagcaggcgatgttcatgtgcgaaggtccacaggaaatggaacggcatatgcacggggcggtgaggaggtgtccgtgaccaggaaacgggtggatcgcaaggacgacaagagccaggccgagcggatcaaggagctcttgggcgagtcggacgccagtggcggcgagctcagcgaagaggaggctaacaagactgagatggcactcaggcccatcctgctaaaagagggactctgggtcacccagaagacaccgattgcgaagcaagaaatcgccagttcaacctcaacacttaaggacactttggcagtggcccagcatttgcaacagctgcatgtggctgcccaggcagccagtttagaggaacctccgctgcagtacggtcgctacccacgcaccattggtaactttctggactccagcgaagcgcagatctttctcatgcaactgccagatgtgttgccatgtgtgggcgacgattccgaagatccggaaccgtctaaaggagatcatcaggccaccagtgaatcggaaccagcaagtcctgcagacaaatgctcaaacggacccaagggcagtgtactacggcagctggaagaagggcagatcggcaagattctgaggtacaaatccggtcgcgttaaactccaattgggggacacacgctttgacttggatatgggtctcgatccgggttttctgcaggaactcatgtctgtaaccgccaatcgcgagcaacgtagtggaaacatgatcaacttgggacccattcaagccaaactaaaggccactccagattgggtgcaccttttccagcagcaggatgcggcatccaagcgaacgaatccagtaccgggcacgtaa

SEQ ID NO: 279 - protein, 410 aa, Drosophila melanogaster
MTVTTAAASTISGASGSTTNNGQSGGGARPLETLNGMTRLTPARDLTLGGRGAGTASKKVFAPNLNAVRNKNANVKTSKDTTQPRSGRRGGRGNGTGATRGRGGNSAGGGNSTLIQTQGLFSEGAGDVHVRRSTGNGTAYARGGEEVSVTRKRVDRKDDKSQAERIKELLGESDASGGELSEEEANKTEMALRPILLKEGLWVTQKTPIAKQEIASSTSTLKDTLAVAQHLQQLHVAAQAASLEEPPLQYGRYPRTIGNFLDSSEAQIFLMQLPDVLPCVGDDSEDPEPSKGDHQATSESEPASPADKCSNGPKGSVLRQLEEGQIGKILRYKSGRVKLQLGDTRFDLDMGLDPGFLQELMSVTANREQRSGNMINLGPIQAKLKATPDWVHLFQQQDAASKRTNPVPGT

SEQ ID NO: 280 - DNA, 2760 bp, Drosophila melanogaster
  CDS (1)..(2760): CT16663
atggtacgcctgggcgggaatggcgaaagggtgcggaagcgacccgcggaatctagtggaaatacggattttgccgatcagggaaatggtgccttcctgcgacacgctaatccgctatcatcggcgccctcttcaagcggctccactccggcccctttgaatgcccccttccgacagtctcgtcacataggggactcggacttggagctaaacatttcctccatgaagttggacgacatggacctgtcctctttcaccactgatagcgaagccggtgggctgagcaaccgcattaagctggactccggggtctggggatcacagccgtttcccaacaaccaacatttgttccgcgagcctatgcgcagcgccttcaagccacagcagcagcaacatcagcagcaccaaccacaacaaatgaagccaccgcaggaagcgaatgccaactttgcactgaatccacagccttttccaaaaattacaactctcgaggatatagagcgcaatatgatcattcagcaggccattccgaaacaacagcagcagagccagcaacaggcggaacgcaaaatgtttgatgattttagtctgggtaacaggcagcaggtgcctacaccaaccatgttgcagcaacagatgttgcagcagcagcatcatcagaaacaacagtcgcagcagcagccgccacaacaagcgcagcacaaggtaccccctggcttcttgggcacgccgcacacctctccaccgaggccaaatttgggtttccccggacccgagctactgcccacgccatcgtcgcagcaacaactaaacggtattggtggcaaccgagtgccgcccggatttatttacccgcaaggtctgcccgggaatattccgcaattgccccagcatcctctaatgcagcagcacatgccgcacaactttccactgcccggcggcaaccagcgacctctacccaatccacaagctctgcccacggccctgaacaatttcgcgatgcatccaagcttcaatgcgatgcgcgccgctggaatccatccaggggcttttatgcaacctccccatccgcaccagatgctgccaccgcgaatgccgccgcacccgctgcaagctgccacaagtctattaggtcagcagccaccgaattccatgtataacatgttcaacatgcgactagtgcaagagatccagcaaaaccatccgctgcttcaacaggctgctgttgtacgccaaatgcaacagagcagagcaggatccgtggccagcgatcgtcagagatcgcaggcgcaacagcagcaacaaggacgacgtccagatggtacaggaaattacccgctggaagagtacgatgaatatgccaacctaatgagcacgcgcgacaagcactggctaatcggaatccagctttcgcagctgaatacggacacgccgtatatcgacgactattactacacggtgttcagggagcgcaaggcccaacagaacgggcaaatgcgcaacagtcaggcgcacaaggacaaccagttgaatcatccgcttactcagccacgcggccatgcgcagcttattctcgtacagttgggcaacaagaatggtactcgcaatggacacggacgtgagcgacgcaactcggagaacaccaacagcacgtcaggcaacacgaacaatggatcaggtggtaacaacaacaacctgacaggctatatattctcaccactgaagttcgagaactcactgggaaagctacagtacggaagtgtgacagctccgcgaaaaattatcgatgctgacattatgagtggtgaatcaaatgccgctgctgaagccaacgcaacttcttcatcaaaaagctcgactccgctgcccacctccgcgagccatgatgtaaatcccagtagcatgcggaagtcgcgacacattttgcttctgattgaaacactgtatcgctatctgctgaagttggaggatttggaaagcccagaagtgatggccaccattgagctgaaaaagaaaaaggaagccgaacggatcgcagcccttgagcagctggaaatggccaataaaacgcccgaagaacgtgctgctgaagccgccaatccgcaaaccatgaatccgcaactaaagaacaagttcaactatgaggtagagacgaaagctgcgttggtcaataaattaaaggcaggtctggccttcgacaaggttatcgccatgatgaatgtgcgcaagggaaagatacttattagacgcataatgccctttattgcggatcaaagcattcgctgggtcgtgtggagcggcgtcttctgttccctacaaacagtggtgaaaaaggacaaggacgacgttgaaggcgtcttgtacgctctttacccagagtttaaaaaacacgttaacaaagctactttcgaactcctagtgagcatttcatctgctattacgctgaatgacaagaaacttgctggaattttttgcagtcgctttggaatcctttcgctggttgccctgatacttcgcgccgaggaaatctacgtctcgcgaactgacgcaactcttagcgaggagaacaggcaaaagtggcgagaatttctggcacaggttgcatcctgcctcaatcgcactattcaaaaccagaccatctcggcagccattgagtcggatgcaattcagccacttatggaccactttgaacggtttaaagatcttaaactggatgcactcttagcattaataactgaagccaggcatcaaattgattag

SEQ ID NO: 281 - protein, 919 aa, Drosophila melanogaster
MVRLGGNGERVRKRPAESSGNTDFADQGNGAFLRHANPLSSAPSSSGSTPAPLNAPFRQSRHIGDSDLELNISSMKLDDMDLSSFTTDSEAGGLSNRIKLDSGVWGSQPFPNNQHLFREPMRSAFKPQQQQHQQHQPQQMKPPQEANANFALNPQPFPKITTLEDIERNMIIQQAIPKQQQQSQQQAERKMFDDFSLGNRQQVPTPTMLQQQMLQQQHHQKQQSQQQPPQQAQHKVPPGFLGTPHTSPPRPNLGFPGPELLPTPSSQQQLNGIGGNRVPPGFIYPQGLPGNIPQLPQHPLMQQHMPHNFPLPGGNQRPLPNPQALPTALNNFAMHPSFNAMRAAGIHPGAFMQPPHPHQMLPPRMPPHPLQAATSLLGQQPPNSMYNMFNMRLVQEIQQNHPLLQQAAVVRQMQQSRAGSVASDRQRSQAQQQQQGRRPDGTGNYPLEEYDEYANLMSTRDKHWLIGIQLSQLNTDTPYIDDYYYTVFRERKAQQNGQMRNSQAHKDNQLNHPLTQPRGHAQLILVQLGNKNGTRNGHGRERRNSENTNSTSGNTNNGSGGNNNNLTGYIFSPLKFENSLGKLQYGSVTAPRKIIDADIMSGESNAAAEANATSSSKSSTPLPTSASHDVNPSSMRKSRHILLLIETLYRYLLKLEDLESPEVMATIELKKKKEAERIAALEQLEMANKTPEERAAEAANPQTMNPQLKNKFNYEVETKAALVNKLKAGLAFDKVIAMMNVRKGKILIRRIMPFIADQSIRWVVWSGVFCSLQTVVKKDKDDVEGVLYALYPEFKKHVNKATFELLVSISSAITLNDKKLAGIFCSRFGILSLVALILRAEEIYVSRTDATLSEENRQKWREFLAQVASCLNRTIQNQTISAAIESDAIQPLMDHFERFKDLKLDALLALITEARHQID

SEQ ID NO: 282 - DNA, 2229 bp, Drosophila melanogaster
  CDS (1)..(2229): CT17394
atgcctagtgataaagaaagtccagaaaccaagccactgaacaataacaatacaaatggaaacggtggcagtgtaccaagcaagccaaagatccagccaaaatatagcattcaccgagatgtgctgacccatgaggtggtgataaagcaaacaggatatgcggccagggacaagagcataccctcctcgctgcgaaactgctggcggagctggaacttctttgcactcttcaccggcgtgattcccattctgcaatggctaccccagtattcacccaggagagatcttcctggcgatataatcgccggcttcaccgtcgccatcatgaacatacctcatggcatggcttatggcattctagcaggagtttcggctggaaatggtctctatatggccgtgtttccggtgctggcctacatgttcctggggacctccaagcacatctccatcggcacttttgcggtggccagcatgatgacggcaaaggtggtggatacgtatgccaacgtagatgaccaccatcagatattgcctattaacgccttcggtttgcaatcgaatggaacagcgactgcgtccccactcctgctaataaattcctcagcgcttgcggattctgtctcctcaaccactatatcaccttttcagcttttaaattctactctaaatgcggatcccattactaaaatagaggtggcgacctctttggcacttaccgtgggaattgtaaacctcctaatggcctttctaagactgggaaccctgtcatcccttttgagtgaacctctggtgaatggattcaccactgctgcagcgtgtcacgtggttaccgcccagctgaaggatgtgctgggcatctcagtaccgcgtcacaaaggtgcattcaagatcatatataccgttattgacgtgatcaagggagtgccacaaacgaatcttgtgaactttggcttttgtatggctgtgattgcgttcatgatgatctgcaatgagatcctaaagccgcgactgagtaaaaagtgtcgctttcccctgccggcggagctgatcatggtgatcggtggtactttaatctccaaatggttcaacctgtatgtcgattacaacgtaaatccagtgggaaaaatacccagtggcttaccggagccagttcttccgcgcttggatcttgtaccaaaggtggccgtagattcaattgccattgctatcgtcacctactccataatcatgtccatgggcctaacgttcgctaagaagcacggatatgaggtcagaccaaatcaggagctgttcgccatgggcattggaaacatggttggcggctgtttctcctgcattccgatggcgtgctctctgtcaagatcggtaattcaggatcagactggtggggtttcgcagatagcttcattggtctccgcttcgctggtggtggtcaccctaatgtggatcggcccctttttcagcagtttgccaaggtgcgttctggctggcgtgattatagtggcactgaagccgatgtttatgcaggccaaggaattgaaaaagttctccaagcagggcaagttggaaatgttcacatggatatctaccttcctctgcgtcgttatcatcgatattgatattgggcttttgattggcatctgcatctccttgttggctctgtatatcaagggactgaagccgtactcctgccttttgggctatatgccagaggctccaggcatctatatggatctcaaccagcatcgaaacgccatgcaggttcccgaagtccgcatcttccgctacagtggatcgcttaactttgccaccagcctgttcttccgacgtgctctgtacgaggccgtgggcctggacaagattcccctaacgaaagtcagcagcagcaatagcaatagtcccagcaagggcagcaaatcgagttattccccagtatcgcagaacggaggcaaggcgatcaatggcaagttagaagagacgtcaggtgctttcaaggtgctcgtcctggatttctccatgctgggacacatcgatgtggctggatgtcgcaccctgacggatctgagcaaggaactgaaggtgcgaggagctcgtttgttgttggctagccccgtagatcgggtatacgataccctcgtgcacagtatggcccttagcgaaggaccttttgagatcttccccaccctgcacgattgtgtggaatatgccaatgcctgtcgaacagcgtaa

SEQ ID NO: 283 - protein, 742 aa, Drosophila melanogaster
MPSDKESPETKPLNNNNTNGNGGSVPSKPKIQPKYSIHRDVLTHEVVIKQTGYAARDKSIPSSLRNCWRSWNFFALFTGVIPILQWLPQYSPRRDLPGDIIAGFTVAIMNIPHGMAYGILAGVSAGNGLYMAVFPVLAYMFLGTSKHISIGTFAVASMMTAKVVDTYANVDDHHQILPINAFGLQSNGTATASPLLLINSSALADSVSSTTISPFQLLNSTLNADPITKIEVATSLALTVGIVNLLMAFLRLGTLSSLLSEPLVNGFTTAAACHVVTAQLKDVLGISVPRHKGAFKIIYTVIDVIKGVPQTNLVNFGFCMAVIAFMMICNEILKPRLSKKCRFPLPAELIMVIGGTLISKWFNLYVDYNVNPVGKIPSGLPEPVLPRLDLVPKVAVDSIAIAIVTYSIIMSMGLTFAKKHGYEVRPNQELFAMGIGNMVGGCFSCIPMACSLSRSVIQDQTGGVSQIASLVSASLVVVTLMWIGPFFSSLPRCVLAGVIIVALKPMFMQAKELKKFSKQGKLEMFTWISTFLCVVIIDIDIGLLIGICISLLALYIKGLKPYSCLLGYMPEAPGIYMDLNQHRNAMQVPEVRIFRYSGSLNFATSLFFRRALYEAVGLDKIPLTKVSSSNSNSPSKGSKSSYSPVSQNGGKAINGKLEETSGAFKVLVLDFSMLGHIDVAGCRTLTDLSKELKVRGARLLLASPVDRVYDTLVHSMALSEGPFEIFPTLHDCVEYANACRTA

SEQ ID NO: 284 - DNA, 2697 bp, Drosophila melanogaster
  CDS (1)..(2697): CT17382
atggtacgtacccggctctgtcaaacttctatcgtcgcaagtatggaggcgatgagttgcgagcatggcagagagtcaacacaacgggtgcggacttcgtgtcctcggccaccacagaaactgaggcagaggcaaggcaggcgagcttggtccaggggatatgttggtttggtcaaccaagccatgacctgctatctaaacagcttgctgcaggcactctttatgacacccgagttcagaaatgctctgtaccgctgggagttcgacaatgacaacgaggccaagaaatcataccaactgcaaaagctcttcctcaacttgcagacctcgcccaaagcggcggtagaaaccacagacctgactcgcagctttgggtgggactcgacggaggcatggcagcagcacgatatccaggaactgtgccgagttatgttcgacgctctggagcacaaattcaagaacactaagcaggcaaatctcatctctaatctgtacgagggcaagatgaatgcttatgtcaagtgtttggggtgcaataccgagaagaacgactgcgaggacacctttctagatatcccgctccctgtgaggccctttggaagcagctccgcatacggcagcatcgaggaagctctgcgtgccttcgttcagcccgaaacactcgatggcaataaccagtatctgtgcgagaagtgcaagaaaaaatgcgacgcccacaagggactgcactttaagtcctttccctacatcctcacgctgcaccttaaacgctttgactttgactaccagaccatgcaccgcatcaaattaaacgacagagtgaccttccctcagacgctcaacctgaacacgttcattaaccgaagtggaaacagcggtgagcaaaactctcagctcaacggcaccgtggacgattgcagcacggcggatagtggatccgccatggaggacgataatttgagcagcggcgtggtgaccacagcgagctctagtcagcacgaaaacgatctgaacgacgaggatgaaggcatcgacatgagcagcagcaccagcaagagcgccaagcaaggatccggtccgtatctctacgaactgttcgccatcatgattcattcaggcagcgcttcgggcggacactactatgcttatattaaggacttcgacaacaacgagtggttctgttttaacgatcagaacgtgactagtatcacccaagaggacatccaacgttcgtttggcggacccaacgggagctactactccagtgcctacacctccagcaccaatgcatacatgttgatgtaccggcaggtggatgccaaaagaaacgagctagtcgccaaggtgcgcgactttcctgagcacatcaaaacgctgctaccaaagctgcactcggaggaggagacgcgcgtgtcccgcctgggcaggcatatcacggttacggacttggctcttccggatttgtacaagccgcgcgtctacttctataatccctccctgaagaagatgaagattaccagagtgtacgtatcgcagagtttcaacatcaacttggtcctcatgtcggcctatgagatgttgaatgtggaacaattcgcgccgctttcccgctgtcgtttggtggcttacaactcctcgatggacacgattattcagtccctggagagttgcacagacccagctttgaccgaactgcgcgcggcgaactacagtctcgacttcctgctggagtaccgggccgaggaccaagagtttgaggtctatcgcgaacggcattacttggtatgtgttaaggtagatctatcgaccatggcgatggacggtcctctggttactcagcagggggagcggaagccacacgtccttcgtgcgatcgccctccgttgcacattagcgagcagcagttcctactcgcacggtgcgcgccacggtgcgaaggctttcgtgtcctacgatccgcatccgacgcggaggccctgcaacatctccagaacatggccaacaccccagtttaagtccataacatacttctacttgaacgtacccaacacggatgccgcgacccttgagatgctcggtgtgcccaccgttgagtcagtcgagtgcgccagcgggggtgatgttgtggatgctgcaatgatgaatggcgtggcacctggtcacatgtcatccagcaacgactacgattggaggcgctacaagcgagatctagtggaacccatgtcacaacccagtcccagccacggccacgagtccaactcggaggacagtagtctgagcgacggagaccgaactctggtggagacggacaacatggcacatcgcggtggaggcgacagccaagtcagttccaccagtcactcgccgcagctgtctagtccggaggacgaagcagcctcacacgatgccatgatgcgcgttcatgcctactgcaatggaaacggcagttatgcggcggccgatgtggtggatccgctgctcctgcccaccagcaccaaccacttcttctaccgccacaaaggtcgagtgcgtggatgtggttggcaccggttccagtctggtcaccagtccgacgaagaggctcagctgcgtacacgcacgcgtgcctataagctgctggtgggcacacacatgcgaatgggggcctttaagaaacaccatcgagcagctgatccaagtgcccgccgcccactttaa

SEQ ID NO: 285 - protein, 898 aa, Drosophila melanogaster
MVRTRLCQTSIVASMEAMSCEHGRESTQRVRTSCPRPPQKLRQRQGRRAWSRGYVGLVNQAMTCYLNSLLQALFMTPEFRNALYRWEFDNDNEAKKSYQLQKLFLNLQTSPKAAVETTDLTRSFGWDSTEAWQQHDIQELCRVMFDALEHKFKNTKQANLISNLYEGKMNAYVKCLGCNTEKNDCEDTFLDIPLPVRPFGSSSAYGSIEEALRAFVQPETLDGNNQYLCEKCKKKCDAHKGLHFKSFPYILTLHLKRFDFDYQTMHRIKLNDRVTFPQTLNLNTFINRSGNSGEQNSQLNGTVDDCSTADSGSAMEDDNLSSGVVTTASSSQHENDLNDEDEGIDMSSSTSKSAKQGSGPYLYELFAIMIHSGSASGGHYYAYIKDFDNNEWFCFNDQNVTSITQEDIQRSFGGPNGSYYSSAYTSSTNAYMLMYRQVDAKRNELVAKVRDFPEHIKTLLPKLHSEEETRVSRLGRHITVTDLALPDLYKPRVYFYNPSLKKMKITRVYVSQSFNINLVLMSAYEMLNVEQFAPLSRCRLVAYNSSMDTIIQSLESCTDPALTELRAANYSLDFLLEYRAEDQEFEVYRERHYLVCVKVDLSTMAMDGPLVTQQGERKPHVLRAIALRCTLASSSSYSHGARHGAKAFVSYDPHPTRRPCNISRTWPTPQFKSITYFYLNVPNTDAATLEMLGVPTVESVECASGGDVVDAAMMNGVAPGHMSSSNDYDWRRYKRDLVEPMSQPSPSHGHESNSEDSSLSDGDRTLVETDNMAHRGGGDSQVSSTSHSPQLSSPEDEAASHDAMMRVHAYCNGNGSYAAADVVDPLLLPTSTNHFFYRHKGRVRGCGWHRFQSGHQSDEEAQLRTRTRAYKLLVGTHMRMGAFKKHHRAADPSARRPL

SEQ ID NO: 286 - DNA, 3258 bp, Drosophila melanogaster
  CDS (1)..(3258): CT17448
atgcccgtttcgatggccgtatgcgaaacggcgaatgtcgtcaacgcagcgctgcgcgaatcccttggcggcaactcctccgccggctcgtcgactgaccaggccaagagcggcgaggacaccaacggcagcctgcaaaatcacatcgtggccaatgccaaacgcatcctgatggccaaaatcgaatacgaggaggtgcccaactaccacgaatcggtgctggagaacctcaagtccaaatatattgtcatcaagccgggaaatccaggcgccatcaatggctttagtggcaaaaacaatacaggcaaacttgtgggcgcaaatggacatgacaataacggcgcccgcaagcaagcggagcacccgaacaatcagtcgcaccacatcaaccaccacaatcatcagcatccgacaagcaatcccaatgagctgcccaagccgaagagggtcctctatccgcgggagaacatacgcattggctggaagcagtcggagcgcaaatggcaggtgggcacgggcatgatcaatgtgggcaacacctgctacctcaactcaacgcttcaggcgctcctgcacatacccgccctggccaattggctcgtttcggagcaggcgcatctggctgactgcaatgtggccgaacctggcagcggttgcatcatttgcgccatgaccaaaacacttttggccacccaaagcaatcagtcggccgtcagacccttcctcatctactcgaagctaaagcagatctgcaaacacatggtcgttggtcgccaagaggatgcgcacgagttcctgcgcttcctggtcgaggccatggagcgggcgtatttgatgcggtttcgtaactacaaagagctggatcagttggttaaggagaccacgccgctgggacagatctttggcggctatctgcgcagcgaggtgcgctgtctgagctgcaaccatgtgtccattacgtttcagcacttccaggatctgttgctcgacatccgcaaggcagactccttggaggatgctttcgagggacacttttctcgcgaacggctagaggatatgggctacaagtgcgagggatgcaagaagaaggtatctgccacaaagcaattctctttggagcgtgccccaatcacgctttgtatacagctgaagcgattctccatgatcggcaacaaactgaccaagcagatttccttcaagtcacgcatagatttgagcaaatacgcagcccgttcacaagcagctcaggctcaaccgctcacctatcgcctggtgtcgatggtcactcacttgggggcgtcccagcactgcggtcactacacggccattggctccacggatacgggcagcttttacaacttcgacgacagctacgtgcggccaatcgcaatgcacagtgtgtgcaacacaaatgcctatataatgtttttcgaactggacctctcacaggctgccagtccggcggccaacaggcccaatggagtgcgtttgaccaacggacacagcacaacgccagtgccggcggcgactgtgtcttcgccttcaccaacgcgtttcattggtcctcaactgccggcgggtggagcaaacggttacactaatggaaatgcccagaaaaccgccatccagttcaagcaacaaaaccagcaaagtccacagaacggactccagctgggtaccggaaagtttcaggacactgcgaagcctccactggttggcgctcacgctaaaggcgaagctacttcagctcccactgcaaatggtaacaaaagttcctccccaagcagcaacagcagcagcaaccataaatcaataaaccagcaacaatatctgccaatttcctcggatgatgaagacatcgaggatgagatgaagcccagaccaacgacagcccagctaccgagcatgcccaatatgacggagaatcatacggagcctaaggcaaagtctcctgtaaagattcaagtaaagactcccgtcaaaacgccactgaaaagtcttgtgccctacgaatcagcatctgaggaggaggaggcgcctctaccgaatccccgcaagcgtccaagtggggaggattctagcgagtcggaccaagagtctggccagaccaatggtcacagtaagaccaatggcagccacaccaacggctcagcctcgtcatcggttcacgttaacaacagcaaacaaaagactgatgccatagacgagatattcaagagcctaaaaaagtccgcagacagtgatgaggacgacgatgaggaggagcccagcattcagctaacgaatggctggcacccacagaagcaatcacagtctcaaagcaaagcaccaccatcgccaaagacgccaccctcgccagcggtcatcaaatcgaaaacgggtatctggaaagttacgcgtaacgatgaggtcgatgccatcgaagatgatgttgacgtcgtggtggtggagggatcgccggtgaaaattccgacgccgaacaagaaccatcgcaatcccttctcgagtagcaagccctccacggactcgcccgcaacgccaggcgccaagcgccaaaagttgctcaacggcagtgcgctcaagtcgcaccagcagccaagggtgggcaatggctaccagagcaatgccacctcgaatgggagcaccatcaatgagctgctgaagcaatcgtatcgtggatacggctcccccgtgctcagttggaatggcaagcccgcggagctcgaaaaggagacttttgagttggtttgtgcgaaacggatagctggtcacggcagtgtggaaggcagcgatatcgtcgagggctcggttgcagtcgacgcggcagtgactagtggcagtgacagtaaagatgtggtcgtaattgcagtggcgctactggtggatgcgcgtgagcagcggcagcgggacatcgacgacgacgaagagaacgagatggatcgtggacgtcagcggaaggtgaagtccggttcggctaagggaaacaatgccagcaacagcacgcccgggtacaatccattccaggagtacgagggccagaagcgctggaacaagaacggcggaggtggaggatttccgcgattctacaatcagaactatcgccagaacttccagcagcgcaacaagttcaagttcaaccgcttcggaggaccaggcagcgccaagttccagcagcagcgagccctgcaacgacatctgtccgccggcggtggcttcagtcggcgacaaccgtcggcgcagcagcagcagcaaacctaa

SEQ ID NO: 287 - protein, 1085 aa, Drosophila melanogaster
MPVSMAVCETANVVNAALRESLGGNSSAGSSTDQAKSGEDTNGSLQNHIVANAKRILMAKIEYEEVPNYHESVLENLKSKYIVIKPGNPGAINGFSGKNNTGKLVGANGHDNNGARKQAEHPNNQSHHINHHNHQHPTSNPNELPKPKRVLYPRENIRIGWKQSERKWQVGTGMINVGNTCYLNSTLQALLHIPALANWLVSEQAHLADCNVAEPGSGCIICAMTKTLLATQSNQSAVRPFLIYSKLKQICKHMVVGRQEDAHEFLRFLVEAMERAYLMRFRNYKELDQLVKETTPLGQIFGGYLRSEVRCLSCNHVSITFQHFQDLLLDIRKADSLEDAFEGHFSRERLEDMGYKCEGCKKKVSATKQFSLERAPITLCIQLKRFSMIGNKLTKQISFKSRIDLSKYAARSQAAQAQPLTYRLVSMVTHLGASQHCGHYTAIGSTDTGSFYNFDDSYVRPIAMHSVCNTNAYIMFFELDLSQAASPAANRPNGVRLTNGHSTTPVPAATVSSPSPTRFIGPQLPAGGANGYTNGNAQKTAIQFKQQNQQSPQNGLQLGTGKFQDTAKPPLVGAHAKGEATSAPTANGNKSSSPSSNSSSNHKSINQQQYLPISSDDEDIEDEMKPRPTTAQLPSMPNMTENHTEPKAKSPVKIQVKTPVKTPLKSLVPYESASEEEEAPLPNPRKRPSGEDSSESDQESGQTNGHSKTNGSHTNGSASSSVHVNNSKQKTDAIDEIFKSLKKSADSDEDDDEEEPSIQLTNGWHPQKQSQSQSKAPPSPKTPPSPAVIKSKTGIWKVTRNDEVDAIEDDVDVVVVEGSPVKIPTPNKNHRNPFSSSKPSTDSPATPGAKRQKLLNGSALKSHQQPRVGNGYQSNATSNGSTINELLKQSYRGYGSPVLSWNGKPAELEKETFELVCAKRIAGHGSVEGSDIVEGSVAVDAAVTSGSDSKDVVVIAVALLVDAREQRQRDIDDDEENEMDRGRQRKVKSGSAKGNNASNSTPGYNPFQEYEGQKRWNKNGGGGGFPRFYNQNYRQNFQQRNKFKFNRFGGPGSAKFQQQRALQRHLSAGGGFSRRQPSAQQQQQT

SEQ ID NO: 288 - DNA, 1221 bp, Drosophila melanogaster
  CDS (1)..(1221): CT17938
atgaaatggacaatgccctcggccatcagtggcgcgccacatgcccacatacccagcaacgaggagtgcggcatccgcgatgtgtggaagcaaaacctggaggaggagttccgcaccatacggaaagtggtgcagaagtaccactatgtggccatggacaccgagtttccaggcgtggtagcacgtccagtcggcgagttccgctccacggcggactatcattaccagctgctgcgctgtaatgtcgatctgctgcggattatccaattgggccttaccttcatggacgacgatggaaagacaccacccggctactccacctggcagttcaacttcaagtttaacctgagcgaggacatgtatgcgcaggactcgatcgatctgctgcagaactccggaattcagttcaagaagcacgaggaggatggcatcgatcccatcgacttcgccgaactgctgatgagctctggcatcgtgctggtggaaaacatcaagtggctgtgcttccactccggctacgattttggctaccttctaaagctgctcaccgatcagaacctgcccccggacgaatctgaatttttcgatctgctgcacatctactttcccaacatcttcgacatcaagtatctgatgaagtcgtgcaagaacctgaaaggcggcctgcaggaggttgccgatcagctggaactgcggcgcgtgggcccccagcatcaggccggctcggatgctctgctgacgggcatggccttcttcaaaatgcgtgaggtacagcacacaaatgatttccacattacaccggtggcgcacgatgtactctttcgctatctgcttgagcacaccatgaacttaaagccgacgatcagctgcatccatctgctgagccgtccggcatacaatgggggccctgcccccgacgaatctgcgataatcagcagtggcaacggcacaggcaacaccaactccaccgagcagttcacctcgagcgcctacatggttacacctcctaatacgcccggcatggccaagagcgatgccgcatcgctgtccaatcgccataccgctttgctgacatatgtttccacacggtttactatgttcttcgaggacaacatcgaccatgcgaagtactccggacacctgtacggcctgggtacctccttcatcgtcaatggcaccaacttccacgacagcaacggtgagacgaacagcgcttcataa

SEQ ID NO: 289 - protein, 406 aa, Drosophila melanogaster
MKWTMPSAISGAPHAHIPSNEECGIRDVWKQNLEEEFRTIRKVVQKYHYVAMDTEFPGVVARPVGEFRSTADYHYQLLRCNVDLLRIIQLGLTFMDDDGKTPPGYSTWQFNFKFNLSEDMYAQDSIDLLQNSGIQFKKHEEDGIDPIDFAELLMSSGIVLVENIKWLCFHSGYDFGYLLKLLTDQNLPPDESEFFDLLHIYFPNIFDIKYLMKSCKNLKGGLQEVADQLELRRVGPQHQAGSDALLTGMAFFKMREVQHTNDFHITPVAHDVLFRYLLEHTMNLKPTISCIHLLSRPAYNGGPAPDESAIISSGNGTGNTNSTEQFTSSAYMVTPPNTPGMAKSDAASLSNRHTALLTYVSTRFTMFFEDNIDHAKYSGHLYGLGTSFIVNGTNFHDSNGETNSAS

SEQ ID NO: 290 - DNA, 3864 bp, Drosophila melanogaster
  CDS (1)..(3864): CT17971
atgagtccaagatccccgctcaggatatctccatttggagtacacatcctcatcgctgctgtgctctttacgctaattcaatcatcgaaacaggactgcgtttggtatggcgtgtgcaacaccaatgacttttcgcacagccaaaactgtccgtacaatggaacagcgaaggaaatggcaactgacggtctggagctgctgaagaaacgctgtggatttctgctggagaatagcgaaaacaaattttgctgcgataagaatcaggtggagctccttaataagaatgtggagctggccggaaatatcttggatcgatgtccatcctgcatggagaacttggtgcggcacatctgccaattcacctgttcaccaaagcaggctgagttcatgcatgtggtggccacgcagaaaaataagaaaggtgatgagtacataagttctgttgacttgcatatatcaacggaatacatcaacaagacttataaatcgtgctctcaggtttctgtaccgcaaacgggtcaattagcttttgatttaatgtgcggcgcttactcagcatctcgctgcaatcctacaaaatggttcaactttatgggcgatgccaccaatccatatgttccttttcaaattacctatattcaacatgagcccaaatcaaatagcaataactttacgcccctcaatgtaacgaccgttccttgcaaccaagcagttagcagcaaactacctgcgtgctcctgctcggactgcgacctatcctgtccccagggaccgccggaaccgccccgtccagagcccttcaaaattgttggactcgacgcctatttcgtcatcatggcagctgtcttcttggtgggagtcttagtattcttaatgggctcgtttctgtttacacaaggttcgtccatggatgacaactttcaagtggatggcaatgatgtttccgatgaaatgccctacagcgagaatgattcatactttgaaaaacttggcgcccacacagaaactttcctggaaacattcttcaccaaatggggaacgtactttgctagcaatcctggcttgactttaattgccggagcatccctggttgttatactggggtatggcatcaactttatagaaatcacaacggatccggttaaactttgggcttcgccgaactcaaaatccagactggagagagagtttttcgatacgaagttttcgccattctataggctggaacagataatcatcaaagctgtgaacttgccacagattgtgcacaacacctcgaacggcccatacaccttcggtcccgtcttcgacagagaatttctaacaaaagtgttggatctgcaggagggcatcaaggaaattaacgcaaatggcacacagctgaaggatatatgctacgcgcctttgtcggatgatggcagtgaaatcgatgtgtcccagtgcgttgtccaatcgatttggggatactttggcgatgatcgagaaagattggatgaccacgacgaggacaatggattcaatgttacctatttggatgccttatacgattgcattagcaatccctatttatgcctagctccttatggcggtcccgtagatccagccatagcacttggaggattcctgccacctggagaccaactgactggcagcacgaaatttgagttggccaatgcgatcattctgacattcctggtcaagaatcatcataacaaaaccgatttggaaaatgccttaacgtgggagaagaaattcgtggagtttatgaccaactatacgaagaacaatatgtcgcagtacatggacatagccttcacatcggagagatcgatagaagacgagctcaacagggagtcccagtcggatgtgctgactattttggtgtcctacctaattatgttcatgtacatagcgatttcgcttggccatgtcaaggagttcaagcgagtgtttatcgacagtaagataacgcttggcataggcggtgtcatcattgttttggcctcggtagtgtcgtccgttggcgttttcggttacatcggtttgccggccaccctgatcattgtcgaggtcataccgtttttagtattagctgtcggagtggataacatttttattctggtccaaactcatcagcgcgatcaacgcaaacccaatgaaacgcttgagcagcaagttggtcgaatactcggcaaggttggacccagtatgctgctcacctcgttgagtgaaagcttttgcttctttctcggtggcctttctgatatgccagccgtaagggcttttgccctatacgccggcgtagccctcatcattgattttctattgcaaataacctgtttcgttagcctatttacgttggatacgaagcgcagggaggagaatcgtatggacatttgttgtttcatcaagggcaagaagccggatagtataactagtaatgagggactcttgtacaaatttttcagtagtgtttacgtcccatttctgatgaagaaaattgtgcgcgccagtgtgatggtcatcttttttgcctggctgtgcttcagcattgccattgcgccacgaatcgacattgggctggatcaagagttggctatgccgcaggatagtttcgtcttgcactatttccaatcgttgaacgagaatctcaacattggtccaccagtgtactttgtgctgaagggcgatctagcctatacgaatagttcggatcagaatttggtgtgtgcaggtcaatattgcaacgatgacagcgtactcacgcagatctacttagccagtaggcactctaaccaaacgtatatcgcgcgtccagcatccagttggatcgatgactacttcgattgggcggcagcagcatcatcctgttgcaaatatagaaaggatagcggcgacttttgtccgcatcaggatacttcctgtttgaggtgtaatatcacgaagaattcacttcttaggccggaggaaaaggagtttgttaagtatttgccatttttcctgaaggacaatcccgatgacacgtgcgccaaggccggtcatgccgcctatggcggagctgttcggtattccaacagccatgaaagactgaacatcgaggcgtcgtattttatggcataccacaccatacttaagtcctcggccgactactttctggccctagagtcggctagaaagatatccgcgaatattacgcaaatgttgcagggcagactaatgtcaaatggagttcctatggcatcggcccttacggtcgaagtgtttccatattcagtattctatgtgttttacgaacaatatctgaccatgtggtcggatacgctacagagcatgggtatttcagttctttccatattcgttgttacatttgttttgatgggcttcgatgttcattccgcattagttgttgtcataacgataactatgattgttgttaatttaggtggccttatgtattattggaacatttcgttgaatgctgtttcgttggtgaatctcgtcatggccgtcggcatatccgtggaattttgttcgcacttggtgcacagcttcgccacatcgaaatcagttagtcaaattgatcgagctgcagatagcctttccaaaatgggtagctccattttctccggaatcactttaaccaaatttgcgggcatactagtgttagcctttgcaaaaagtcagatattccaggtgttttatttccgtatgtacttgggaatcgttgtaattggggcggcgcacgggttgatctttctgcccgttctattaagttatattggggctcctgtaagtaatgctagattaaggtatcatagccaggcggctgctgagcacgagacagcactagcgggaatactataa

SEQ ID NO: 291 - protein, 1287 aa, Drosophila melanogaster
MSPRSPLRISPFGVHILIAAVLFTLIQSSKQDCVWYGVCNTNDFSHSQNCPYNGTAKEMATDGLELLKKRCGFLLENSENKFCCDKNQVELLNKNVELAGNILDRCPSCMENLVRHICQFTCSPKQAEFMHVVATQKNKKGDEYISSVDLHISTEYINKTYKSCSQVSVPQTGQLAFDLMCGAYSASRCNPTKWFNFMGDATNPYVPFQITYIQHEPKSNSNNFTPLNVTTVPCNQAVSSKLPACSCSDCDLSCPQGPPEPPRPEPFKIVGLDAYFVIMAAVFLVGVLVFLMGSFLFTQGSSMDDNFQVDGNDVSDEMPYSENDSYFEKLGAHTETFLETFFTKWGTYFASNPGLTLIAGASLVVILGYGINFIEITTDPVKLWASPNSKSRLEREFFDTKFSPFYRLEQIIIKAVNLPQIVHNTSNGPYTFGPVFDREFLTKVLDLQEGIKEINANGTQLKDICYAPLSDDGSEIDVSQCVVQSIWGYFGDDRERLDDHDEDNGFNVTYLDALYDCISNPYLCLAPYGGPVDPAIALGGFLPPGDQLTGSTKFELANAIILTFLVKNHHNKTDLENALTWEKKFVEFMTNYTKNNMSQYMDIAFTSERSIEDELNRESQSDVLTILVSYLIMFMYIAISLGHVKEFKRVFIDSKITLGIGGVIIVLASVVSSVGVFGYIGLPATLIIVEVIPFLVLAVGVDNIFILVQTHQRDQRKPNETLEQQVGRILGKVGPSMLLTSLSESFCFFLGGLSDMPAVRAFALYAGVALIIDFLLQITCFVSLFTLDTKRREENRMDICCFIKGKKPDSITSNEGLLYKFFSSVYVPFLMKKIVRASVMVIFFAWLCFSIAIAPRIDIGLDQELAMPQDSFVLHYFQSLNENLNIGPPVYFVLKGDLAYTNSSDQNLVCAGQYCNDDSVLTQIYLASRHSNQTYIARPASSWIDDYFDWAAAASSCCKYRKDSGDFCPHQDTSCLRCNITKNSLLRPEEKEFVKYLPFFLKDNPDDTCAKAGHAAYGGAVRYSNSHERLNIEASYFMAYHTILKSSADYFLALESARKISANITQMLQGRLMSNGVPMASALTVEVFPYSVFYVFYEQYLTMWSDTLQSMGISVLSIFVVTFVLMGFDVHSALVVVITITMIVVNLGGLMYYWNISLNAVSLVNLVMAVGISVEFCSHLVHSFATSKSVSQIDRAADSLSKMGSSIFSGITLTKFAGILVLAFAKSQIFQVFYFRMYLGIVVIGAAHGLIFLPVLLSYIGAPVSNARLRYHSQAAAEHETALAGIL

SEQ ID NO: 292 - DNA, 4128 bp, Drosophila melanogaster
  CDS (1)..(4128): CT18192
atgattgtgaaaatggagccggacgaactgatcacattccgtgtccagtatctggtggacagcgatccgctctcggcgtgcaccgccttcccgatcccggtgcgggcgcccacctacgccttcgccaccaccatgccgctggccaatcagctgggcacaatcctgcggctgctgaatgcaccacaaagcatcgacgatgcagccattcaggtgtacaaggatggcgactacggagcctacttggatctggagtcatcgctggccgaacaggccgaggaaatcgagggagtcaacgtcagccgcaaaaactctctggtggtgcgaacgcagttaaatgtgcgcgtacaagccataattgagaaactgctctccgcacagggcagtgacctgcggcgtgctctcttctcgctgaagcaggtgttccaggaggataaggatctggtgcacgccttcgtggccctcggcggcctcaattgcctggtgcgcgtgggcaattgtgcggatcaaaactatcagaattacattctgcgagccctcggtcaggtcatgctctatgtggacggaatgaacggcgtgatgaagcatgagccgacgatgcagtggctctactcgctgattgcctccaattaccgatccgtggtgaagaccgccctcaagttgttgctggtcttcgtggagtacgccgagtccaactgctatgtgctggtcagtgccattcacgcagtggatgcttcccagggcacactgccctggtcaaatataatgagactgcttaaggactatgacaatgctgatgccgaactggtgatctatgccacttcgctgattaacaaaactctggcgggtctgaatgatcaggacagcttctacgacgaaagcgatcttctagagcagcagggcatggagactgtgatccagcgttatatgtccaagccgggcactgatttggatctgctcgatcagttgcaactgtatgaggcggttctcaaatttgaggatggtgagtcggatggacagcgtttgccgcagaactcaatgcgaaaaacacaacgctatcgtccgggagcaaataccactgaaagacgcaagtcgcgtcgccatagcacagataatagtcccgcatcactcacaaaggtcctgcccaccactgtcctccggatgacacctacacaagctacggtggatgaggatagttctggctccaccaactcaacggaatttagtggcggtctctttaatgagaagaaacctcgtgatggtgcaggcgtgacaccaggacttcgaagaagacgtgagcgggcggagcggcataagagctttctgaaggagcaacaggaggcggcggccaatggaatctttgctgctctcgagcagcgggagggactgggccagattgtaaccgccatacccgctaccattcaaaccggcgatagtccgcctcagtccttgcaacatgaggtgccaccgtgcaacaacatcagcggaatcaccaacattagtaacaacaatgtcagcaaccttagctgcaatgacacgccgaacaacagcctcttggtgatgagtcctagcaagcaactgctcactggaagccacagcatctccattattaacaacagcttcgataaggcgagcaataacaatcagagcgagttcctgaccaagaagaacctattccgggaacgcaattcaactgtgatcaatggtattatgaagaatatccagcaaaccgatagtgcctataagaagtacgagaacgaagcgaaccggctgaacaactattacagtcagtcgccgaaacatcagatccatcagcccattcagccaacgccggaagtccttttgagtcccaaaaaaacgctaaatgcctctgggtttgatttcacgcccgctcccctcagttccaccccggttaagtgtgatgtcccgccggaaccggagccactgagtccggtaaagaaacccgctgcggcaccaccaccgcctcctccaccgccaccgccgccaccaccaccacctggttggtggcacgcccccatctacaacagcccgcaagctcgaaccctaaccagtactaacccagagctgctgccgcatcctgtggatccttcagatatggaaagcgaggatcagcagctgctcctccagctgaagcgggaccacacggtcaaggatctcacccagaagttgagcaacctgccaatgagtcccactcaggattcggcgaatcgcgccctcgtcggcgatatgtccggtctgatttcgaaagccaaagagggtctggccaagagcaagagcaagggagagatatccagcttatccgtagatggggttgtacttctcgtacagggcgacgtaggcggccttggcgtcatcgacggacagtcccttgcggctcagccaggcatcgtacttagcggcaccctcggcatcagcgggcttctcgatgttaatgtcgccctcctggaactgcttgtacaggccatagaactccaggtacacctccgttgggggcttcttgctgaaggccttggtcttctcgaggatagcgttgaactatcttctagtgtcgatcaggatgtaaagaagtctgagcccaagaagtcggaaaatgaacttcactgggaggaactggttaggaatatgacaaggcccctaaatctttgcgatctggactttacggatctgagggatgatgacgagaaggatgtgctggcccctcgaagtttgggtgccggtatacccccgccgcctcccccgctgggtggagccattgccccaccgccaatgatgcctccaagcttggcaccaccacccatgtacggatatggcggtagtctaaccaatagtgtcaattcgttaaatggttctataaatggtgaactggtcaatggtaataacaccatcaaaaagaacaagaaaacggtcaagctcttctggaaggaagtgcgcgaggacatgataccgcaggtggtgggcaagaccatatgggatgagctgcccgatgccaacgtggacacacagaagctcgaacatctctttgagtcccgggccaaagacttgatgaccaagaaacaacaagagctgaacaagagcaaagagatcatcgtgcttgatcacaagcgctccaatgccatcaatattgcgatcactaagctgcctcctccgagggccattaagacggccatcctcaaaatggatgccactgtggtcacacgggagggaatcgacaagctactcaatatgctgcccactgatgaggagcgtggcaagatccaggaggcccagttatccaacccagagttgcccctgggcagcgccgagcagttccttttgaccctggcctccatttcggagctggaagctcgcctgaaattgtgggctttccgtctggactttgacaacagtgagaaagagattgcggaaccgctgatggacctcaagcaaggcattgagatcctgcgtcagaatcgcaccttccgcagcatcctctctactctgctgtctgtgggcatctttttgaatggagctcccgtcaagggattccagatcgagtatctggcaaaggttccggaagtgaaggacacggtgcacaagcactcgctgctgcaccacctctgccacatggtcatggagtcgagcagtgatactagtgatctgtactccgagatcggacccattacgcgagcctccaaggcggatttcacggacttggcacacaatctcaatcagttggaggcggagtgcaaggcatgctgggatcgtctgaaacttattgccaaacacgactgcccgccaccgttaaagcagaagctggtggatttcttggccgattgtgcggagcgcatcatcatcctgcaaattgtccatcgacgggtgatgaatcgctaccggaagttccttttgtggctgggaatgccgcagcacagtgtcgcggaatcgcgtcccaacgaattctgccggacactctccgagttcgccctggaataccgcaccactagagagcgggttcagcagcagctggagaagaaggccaaccaccgggaacggaacaagacccgcggcaaactgatcatcgatatggccaagttcaagaccaaagatgacgtggccgatgacgagttgaagtaa

SEQ ID NO: 293 - protein, 1375 aa, Drosophila melanogaster
MIVKMEPDELITFRVQYLVDSDPLSACTAFPIPVRAPTYAFATTMPLANQLGTILRLLNAPQSIDDAAIQVYKDGDYGAYLDLESSLAEQAEEIEGVNVSRKNSLVVRTQLNVRVQAIIEKLLSAQGSDLRRALFSLKQVFQEDKDLVHAFVALGGLNCLVRVGNCADQNYQNYILRALGQVMLYVDGMNGVMKHEPTMQWLYSLIASNYRSVVKTALKLLLVFVEYAESNCYVLVSAIHAVDASQGTLPWSNIMRLLKDYDNADAELVIYATSLINKTLAGLNDQDSFYDESDLLEQQGMETVIQRYMSKPGTDLDLLDQLQLYEAVLKFEDGESDGQRLPQNSMRKTQRYRPGANTTERRKSRRHSTDNSPASLTKVLPTTVLRMTPTQATVDEDSSGSTNSTEFSGGLFNEKKPRDGAGVTPGLRRRRERAERHKSFLKEQQEAAANGIFAALEQREGLGQIVTAIPATIQTGDSPPQSLQHEVPPCNNISGITNISNNNVSNLSCNDTPNNSLLVMSPSKQLLTGSHSISIINNSFDKASNNNQSEFLTKKNLFRERNSTVINGIMKNIQQTDSAYKKYENEANRLNNYYSQSPKHQIHQPIQPTPEVLLSPKKTLNASGFDFTPAPLSSTPVKCDVPPEPEPLSPVKKPAAAPPPPPPPPPPPPPPPGWWHAPIYNSPQARTLTSTNPELLPHPVDPSDMESEDQQLLLQLKRDHTVKDLTQKLSNLPMSPTQDSANRALVGDMSGLISKAKEGLAKSKSKGEISSLSVDGVVLLVQGDVGGLGVIDGQSLAAQPGIVLSGTLGISGLLDVNVALLELLVQAIELQVHLRWGLLAEGLGLLEDSVELSSSVDQDVKKSEPKKSENELHWEELVRNMTRPLNLCDLDFTDLRDDDEKDVLAPRSLGAGIPPPPPPLGGAIAPPPMMPPSLAPPPMYGYGGSLTNSVNSLNGSINGELVNGNNTIKKNKKTVKLFWKEVREDMIPQVVGKTIWDELPDANVDTQKLEHLFESRAKDLMTKKQQELNKSKEIIVLDHKRSNAINIAITKLPPPRAIKTAILKMDATVVTREGIDKLLNMLPTDEERGKIQEAQLSNPELPLGSAEQFLLTLASISELEARLKLWAFRLDFDNSEKEIAEPLMDLKQGIEILRQNRTFRSILSTLLSVGIFLNGAPVKGFQIEYLAKVPEVKDTVHKHSLLHHLCHMVMESSSDTSDLYSEIGPITRASKADFTDLAHNLNQLEAECKACWDRLKLIAKHDCPPPLKQKLVDFLADCAERIIILQIVHRRVMNRYRKFLLWLGMPQHSVAESRPNEFCRTLSEFALEYRTTRERVQQQLEKKANHRERNKTRGKLIIDMAKFKTKDDVADDELK

SEQ ID NO: 294 - DNA, 2640 bp, Drosophila melanogaster
  CDS (1)..(2640): CT18619
atgtcgtcatcgcaggctgtccgctcctcgaaatactcctaccgtgccacgtccaccggacccggtaccgccgatgtgaacatcgagtacatccaggacctgagctcgctctcccgcttggaggacaagatccgtttgctccaagatgatcttgaagttgaacgtgagttgcgtcaaaggatcgagcgcgagaaagccgatctcagcgttcaggtcattcagatgtccgagcgtctcgaggaggccgagggtggtgctgaacatcaatttgaagccaaccgcaagcgcgacgctgagctgctgaagctgcgcaagctgcttgaggatgttcatcttgagtcggaggagaccactttgcttttgaagaaaaagcacaacgaaattatcacggatttccaggaacaggttgaaatcctaacgaaaaacaaggccagagccgaaaaggacaaggccaaattccagaccgaagtctacgagctgctctcccagatcgagtcctacaacaaggagaagatcgtgtcggagaagcacatctccaaactggaggtctcgatctccgagctcaacgtgaagatcgaggagcttaaccgcaccgttatcgacattagctcccaccgatcccgcctctcgcaggagaacattgagctgaccaaggacgtccaagatctgaaggttcagctggacacggtctcgttctccaagagccaggtcatttcccagctggaggacgcccgccgtcgcttggaggacgaggaccgtcgtcgctcgctgctcgaatcctctctgcatcaggttgagatcgaattggactcggttcgtaatcaactcgaggaggagtccgaggcccgcatcgacttggaacgtcagttggtcaaggccaatgccgatgccacctcctggcagaacaagtggaactccgaggtggctgcccgcgccgaggaggtcgaggagatccgtcgcaagtaccaggtccgcatcaccgagctggaggagcacatcgagtccctcatcgtcaaggtcaacaatctggagaagatgaagacgcgcctggccagcgaagtggaggtgctcatcatcgatctggagaagtcgaacaacagctgccgcgagctgaccaagtcggtcaacaccctcgagaagcacaacgttgagctgaagagccgtctggacgagaccatcatcctgtacgagaccagccagcgcgacctgaagaacaagcacgccgacctcgtccgcactgtccacgaactggacaaggtcaaggacaacaacaaccagctgacccgcgagaacaagaaactgggagatgatcttcatgaggccaagggtgccatcaacgaactgaaccgtcgtctgcacgaattggaactggagctgcgtcgcctggagaacgagcgtgatgagctgaccgctgcctacaaggaagccgaggctggccgcaaggctgaggagcagcgcggacagcgcctggccgccgacttcaaccagtaccgccacgacgccgagcgtcgtctggccgagaaggatgaggagatcgaggccattcgcaagcagacctcgatcgagatcgagcagctcaatgcccgcgtcatcgaggcggagacccggctgaagaccgaggtgacccgcatcaagaagaagctgcagatccagatcaccgagctggagatgtcgctggatgtggccaacaagaccaacatcgatctgcagaaggtgatcaagaagcagtcgctgcagctgaccgaactgcaggcccactacgaggatgtccagcgccagttgcaggccaccttggaccagtatgccgttgcccagcgccgtctggccggtctcaatggcgagctggaggaggtgcgctcgcacctggacagcgccaaccgtgccaagcgcaccgtggagctgcagtacgaggaggctgcctcccgcatcaacgaactgaccaccgccaatgtcagcctcgtctccatcaagtccaagctggagcaggagctctccgtggtcgcctccgactacgaggaggtgtccaaggagctgcgcatcagcgacgagcgctaccagaaggtccaggtggagctcaagcatgtcgtcgagcaggtgcatgaggagcaggagcgcatcgttaagctggagaccatcaagaagtccttggaagtcgaagtcaagaacttgtccatccgcttggaggaggtcgagctgaacgccgtcgccggcagcaagcgcatcatcagcaagctggaagcccgcatccgcgatctggagctggagctggaggaggagaagcgccgccacgccgagaccatcaagattctgcgcaagaaggagcgcaccgtcaaggaggtgctggtgcagtgcgaggaggaccagaagaacctcatcctgctgcaggacgcgctggacaagtccactgccaagatcaacatctaccgccgccagctgtccgagcaggagggtgtctcccagcagaccaccacccgtgtgcgccgcttccagcgcgagctggaggctgccgaggatcgcgccgacaccgccgagtccagcctgaacatcatccgcgccaagcaccgcacattcgtcaccacctcgacggtgcccggatcccaggtgtacatccaggagaccacaaggacgatcaccgaatag

SEQ ID NO: 295 - protein, 879 aa, Drosophila melanogaster
MSSSQAVRSSKYSYRATSTGPGTADVNIEYIQDLSSLSRLEDKIRLLQDDLEVERELRQRIEREKADLSVQVIQMSERLEEAEGGAEHQFEANRKRDAELLKLRKLLEDVHLESEETTLLLKKKHNEIITDFQEQVEILTKNKARAEKDKAKFQTEVYELLSQIESYNKEKIVSEKHISKLEVSISELNVKIEELNRTVIDISSHRSRLSQENIELTKDVQDLKVQLDTVSFSKSQVISQLEDARRRLEDEDRRRSLLESSLHQVEIELDSVRNQLEEESEARIDLERQLVKANADATSWQNKWNSEVAARAEEVEEIRRKYQVRITELEEHIESLIVKVNNLEKMKTRLASEVEVLIIDLEKSNNSCRELTKSVNTLEKHNVELKSRLDETIILYETSQRDLKNKHADLVRTVHELDKVKDNNNQLTRENKKLGDDLHEAKGAINELNRRLHELELELRRLENERDELTAAYKEAEAGRKAEEQRGQRLAADFNQYRHDAERRLAEKDEEIEAIRKQTSIEIEQLNARVIEAETRLKTEVTRIKKKLQIQITELEMSLDVANKTNIDLQKVIKKQSLQLTELQAHYEDVQRQLQATLDQYAVAQRRLAGLNGELEEVRSHLDSANRAKRTVELQYEEAASRINELTTANVSLVSIKSKLEQELSVVASDYEEVSKELRISDERYQKVQVELKHVVEQVHEEQERIVKLETIKKSLEVEVKNLSIRLEEVELNAVAGSKRIISKLEARIRDLELELEEEKRRHAETIKILRKKERTVKEVLVQCEEDQKNLILLQDALDKSTAKINIYRRQLSEQEGVSQQTTTRVRRFQRELEAAEDRADTAESSLNIIRAKHRTFVTTSTVPGSQVYIQETTRTITE

SEQ ID NO: 296 - DNA, 1099 bp, Drosophila melanogaster
  CDS (1)..(1098): CT18969
atgacgacctacttcaactaccccagcaaggagctgcaggatgagctgcgcgaaatcgcccagaaaatcgttgcccccggcaagggaatcctcgccgccgatgagtccggcccaaccatgggcaagcgtctgcaggacatcggcgtggagaacaccgaggacaaccgccgtgcctaccgtcagctgttgttcagcactgaccccaagctggccgagaacatctctggagtgatcctgttccacgagaccctctaccagaaggccgatgatggcacccccttcgccgagatcctgaagaagaagggaatcattctgggcatcaaggtcgacaagggtgttgtcccactgttcggctctgaggatgaggtcaccacccagggtctggatgacctggccgcccgttgcgcccagtacaagaaggacggttgcgacttcgccaagtggcgttgcgtcctgaagatcggcaagaacaccccatcctaccagtcgatcctggagaacgccaatgtcctggcccgctacgcctccatctgccagtcgcagcgcatcgtcccaattgtggagcccgaggttctgcccgatggcgatcacgatctggaccgcgcccagaaggtcaccgagaccgtcctggccgccgtctacaaggccctgagcgaccaccacgtctacctggagggtactctgctgaagcccaacatggtcaccgccggtcagtcggccaagaagaacaccccagaggagatcgctctggccaccgtgcaggctctgcgccgcaccgttcccgccgccgttactggcgtgaccttcctgtctggaggtcagtccgaggaggaggccaccgtcaacctgagtgccatcaacaacgttcccttgatccgcccatgggccctcaccttctcgtacggtcgtgccctgcaggcctccgtcctgcgtgcctgggctggcaagaaggagaacattgctgccggccagaacgagctgcttaagcgcgccaaggccaattcccaggcctgccagggtatttacgtgcccggctcaattccgtcgtttgccggcaatgccaacctctttgtcgcccagcacaaatactaagtcctaa

SEQ ID NO: 297 - protein, 363 aa, Drosophila melanogaster
MTTYFNYPSKELQDELREIAQKIVAPGKGILAADESGPTMGKRLQDIGVENTEDNRRAYRQLLFSTDPKLAENISGVILFHETLYQKADDGTPFAEILKKKGIILGIKVDKGVVPLFGSEDEVTTQGLDDLAARCAQYKKDGCDFAKWRCVLKIGKNTPSYQSILENANVLARYASICQSQRIVPIVEPEVLPDGDHDLDRAQKVTETVLAAVYKALSDHHVYLEGTLLKPNMVTAGQSAKKNTPEEIALATVQALRRTVPAAVTGVTFLSGGQSEEEATVNLSAINNVPLIRPWALTFSYGRALQASVLRAWAGKKENIAAGQNELLKRAKANSQACQGIYVPGSIPSFAGNANLFVAQHKY

SEQ ID NO: 298 - DNA, 1569 bp, Drosophila melanogaster
  CDS (1)..(1569): CT19788
atgagtgatacgcgtgagcagattctggagcaaatcaaagtgcaaggcgatctcgtccgtcaattgaaagcagcgaaggagtcgaaggagaagatcgatgaggaggtcgcccgcctactggccctaaaggccactcttggcggagatgccgcccccaccaatcagaagttcacgctaaagacgcccaaaggcacacgggactatggtcctcagcagatgaccctgcgccagggcgtcctggacaagatcgtccaggtgttcaagcgccacggcggcgaagccatcgatacgcccgtgttcgagctgaaggaagtgctgacgggcaagtacggcgaggactcaaagctgatctacgacttgaaggatcagggcggtgagatcctatcgatgaggtatgacttgaccgtgccgctggctcgttacctggcgatgaacaagatctcgagcatcaagcgctaccacatcgccaaggtctatcgacgcgacaatccggcaatgaccaagggtcgctatcgggagttctaccaatgtgacttcgacatcgccggcacctacgatcccatgctgccggatgccgagtgcgtcaagattgtgtcggagatactggacacgctggacattggagactatgtgataaagctaaatcaccgccagcttttggacggcatgttccaggcgtgcggagtgccggcggatagcttccgcaccatctgctcagcggtggataagttggataagtcgccctgggcggatgtgcgcaaggagatggtggatgagaagggtctggacgaggcagcagcggatcgaattggcgagtacgtgcgactgagcggcggtgccgagctggtggaacaactgctggccaacgagaagctcaaggctgtgccaaatgccgtaaagggtctggagggcatgaagcagctccttaagtactgttccatattcggtctggataagcgagttagcttcgatttgagtctggcccgtggcctggactactacaccggtgttatctacgaaggtgtgctcaagggagagtccgccaccgtggcatctccggcgaagacatcacagcagaacggagagcaggcgaacgagccggccaccgtgggatccgtggctggaggcggtcgctacgacaacctggtgggcatgttcgatccgcgcggcaaggctgtgccctgcgtgggcgtgtctattggcgtggagcgcattttctcggttctggaggcgcgggcggctgcaagcggtctgaagttgcgaaccagcgacgtggaggtttacgtggcctccgcccacaagggtctccacgagcagcgtctgaaggttctgaacctgctgtgggatgcgggcgtgaaggcggagcactcttacaagctgaaccctaagctgttagtacagctgcagcactgcgaggagcaccagattcctctggtggttgtcctcggcgacgcagagctggcgcagggattggtcaaactgcgtgaggtgaccacgcgcgaggagaccaacgtaaagcttgaggatctggccgccgagatccggcgacggcagcaagcctccgcctaa

SEQ ID NO: 299 - protein, 522 aa, Drosophila melanogaster
MSDTREQILEQIKVQGDLVRQLKAAKESKEKIDEEVARLLALKATLGGDAAPTNQKFTLKTPKGTRDYGPQQMTLRQGVLDKIVQVFKRHGGEAIDTPVFELKEVLTGKYGEDSKLIYDLKDQGGEILSMRYDLTVPLARYLAMNKISSIKRYHIAKVYRRDNPAMTKGRYREFYQCDFDIAGTYDPMLPDAECVKIVSEILDTLDIGDYVIKLNHRQLLDGMFQACGVPADSFRTICSAVDKLDKSPWADVRKEMVDEKGLDEAAADRIGEYVRLSGGAELVEQLLANEKLKAVPNAVKGLEGMKQLLKYCSIFGLDKRVSFDLSLARGLDYYTGVIYEGVLKGESATVASPAKTSQQNGEQANEPATVGSVAGGGRYDNLVGMFDPRGKAVPCVGVSIGVERIFSVLEARAAASGLKLRTSDVEVYVASAHKGLHEQRLKVLNLLWDAGVKAEHSYKLNPKLLVQLQHCEEHQIPLVVVLGDAELAQGLVKLREVTTREETNVKLEDLAAEIRRRQQASA

SEQ ID NO: 300 - DNA, 1185 bp, Drosophila melanogaster
  CDS (1)..(1185): CT19850
atgccattgaagtggtccctgctactcggcacttttgtgctcatcagctgctcctccgtggaagcagccgtcacagtgggtcgggcctgcaaggtgacggataccatgcccggtatctgcagaacatcctccgattgtgagcccctaatcgatggctacatcaagtcgggagtcctgacgctcaacgatgtgcccagctgtggcctcggcgcttggggtgagatcttctgctgtcccaccaagccgtgctgtgacaatagtaccataacaagcgtttccacaagctccaccacaagcacaaaagctccaatgaccagtggtcgtgtcgatgtgcccacgttcggaagcggtgatcgcccagcagtggcagcctgcaagaagattcgcgagcgaaaacagcagaggagcggcaatcaattggtcatacacatcgtgggcggttatccggttgatccgggtgtatatccccatatggcggccattggttacatcacttttggcaccgatttccgatgcggcggatcgctaatcgccagtcgcttcgtcctgaccgccgcacattgtgtcaacaccgatgccaatacgccggcctttgttcgcttgggagctgtgaacattgaaaatccagaccattcctaccaggatatcgtcatacgaagcgttaagatccatccgcagtatgtgggcaataagtacaacgatatcgccattttggaactggaacgtgatgtcgtcgagacggataacatccggcccgcttgtctccatacggatgccaccgatccgccatcgaactccaagttctttgtcgccggttggggcgtcctaaatgtaaccactcgggcgcgatctaagatcctgttgcgcgctggtctggagctggtgcctctggaccaatgcaatatatcctatgcggagcagcccggttccataaggttgctcaagcagggcgtgatcgattcgttgctgtgcgccattgatcaaaagctcatcgccgacgcatgcaagggcgactccggtgggccgctcattcatgagctcaacgtggaggacggcatgtacaccatcatgggcgtcatctcgtcgggattcggatgcgccaccgtcacaccgggactctatacgcgtgtctcgtcctatctggactttatcgagggcattgtctggccggacaatcgggtgtaa

SEQ ID NO: 301 - protein, 394 aa, Drosophila melanogaster
MPLKWSLLLGTFVLISCSSVEAAVTVGRACKVTDTMPGICRTSSDCEPLIDGYIKSGVLTLNDVPSCGLGAWGEIFCCPTKPCCDNSTITSVSTSSTTSTKAPMTSGRVDVPTFGSGDRPAVAACKKIRERKQQRSGNQLVIHIVGGYPVDPGVYPHMAAIGYITFGTDFRCGGSLIASRFVLTAAHCVNTDANTPAFVRLGAVNIENPDHSYQDIVIRSVKIHPQYVGNKYNDIAILELERDVVETDNIRPACLHTDATDPPSNSKFFVAGWGVLNVTTRARSKILLRAGLELVPLDQCNISYAEQPGSIRLLKQGVIDSLLCAIDQKLIADACKGDSGGPLIHELNVEDGMYTIMGVISSGFGCATVTPGLYTRVSSYLDFIEGIVWPDNRV

SEQ ID NO: 302 - DNA, 3678 bp, Drosophila melanogaster
  CDS (1)..(3678): CT19962
atggaaactagacaacccagttccggtgatgatctaaagccagagctgtacttcctcatttccaagttcctggccgcgggaccgctggaggagacggcgaaggtcttgatccgggaactcgaagagaagaaggttttgccgcgtcgtctcgattggcagggaaacgagcatgagcagacctttgaggaattggaacgaaagtacaagcacattggcgccaatcacttgcttgaaatatgcagtcgtctgggtccactggtggatcgcgagcttccgcccagtgttccgggcatcaactcgctgttgggtactgggcgccagaacctcctgcgcaccaaggaaaccgtctactgccatcgctccttaagggactactgcacccgcctgaatggagtctcgctgccggattcggtccttacaaagccgacccacaacttagatcgcgttctaactggacgggaacacggcggggaagtccgtcgcaagctcctcgtgcccacggacctctaccgccgaacaaaattgctccgtcgcactgtgggccacctgtcctcagtgtactgtgttctgtttgatcgcacaggaagatacatcatcaccggagccgatgatctacttattaagatatggtcagcggcagatggccgcctgctggccactctgcgaggcgcctcatccgagattacagacatagccattaacttggacaatacgatgctggctgccgggtcattggatcacatactaagagtgtgggacatgcaaaccacatcacccatcgccgtactgtctgctcacacgggcatgataacttcggttaacttttgtccgtcgccacgtagcgatctgaaatatctggtgactaccagcacagatggatcgatcgccttctggcaatactcaacgccgcgcgggcaaaagatcacgtttgccccgaagccaacgcagtatcatgagaaactgcggcccggacaagctcagatgatgtgtaccaccttttcgccaggaggcatttttctggccgctgggtctgccgatcaccatgtgcgcgtctatatgatgggcgaggacggtccgaagcgaatattggagacggaagcttacacagatgccgtggactcggtgcagtggtcgcatcgtggactgagatttatatcggggagcaaggacggcacagcacacatctggacgtttgagtcgcagcagtggaaaagttccaaactatgcatgacggagcgtctggccagctgcccggaaccagaggagggaaagaggcttaaggtaaccatggtggcttgggatgcctcggaccgttatgtcatcaccgccgtaaacgattttactataaaaatctgggactcgaagtcagccaagctgcatcgtgttctgcgtgggcacaaggatgagctttatgtgcttgagtcgaacccaagagatgagcatgtcctgctttccgccgggcacgatggccaggtatttctgtgggacatcgagcagggcgtttgtgtggccaacttccttaacgacatcgatggccaaggccatggcagtgtctttgatgcaaagtggtcaccggatggcacaatgatagctgccaccgattcgcatggacacatcctgatttttggtttgggcgtgtgcattgaaaagtacaaaatgcttcccacggagctgttctttcacacggattttcgacctttattgagagatgcgcagcaccatgtggtggacgagcagacgcagataatgccgcacctaatgcccccgcctttcctggtcgatgcagatggcaacccgcatccatcaaggtttcaacgatttgtgcctggtcgtgagagctgtagcctagaccaattgattccaaatcttacggtaggcgtggatggcgtagtaatcgacgatggaggtgcaggtggagatgctgttgtggccgctgcacccgctgaagctccgccagccgcattgccccctgctgctgctggaggaccacagggagctaactactcccatatcgaccgcatgattgcagccttggccaatcggcagtcggttaatgtaaatgccaatgatgccaatccgaccaacggcaaccagtccttcgaacgtttgaccaatcgtcaaatgccggactccaatggcaggcaatcgtcacgtggcaatgtcctgggtagtcgtttgagcacgcctcgccaaggatggggtgccgcagctgccgcgccagttgaggatcaagcagggccgtctcaacctccggcagaacctgcagccgaacctggccaggcacaagtccaacaggcgctgcctctgaaattcatccgtcgcacttatgtgcgtcccatgaagtatccccagttgcaaaaccttaagcagactatttactctgccggtcagtttgaaaagcaggagtacaaacgcgaaatgcgacgccgacccatcatgataaacactgccagtgcagcatcttcgcagcagccaggaagcgttggcaggccacgaaacacacgtggcaatggcggcggcgcaagagctggacgaagacgtggcccccagccagctggcggacagccacaacccgcttatcgcacccgcgctgttcgggatcaggagccggagcactacgatgaggtagcgccgccacccgaggaagaggaggaagatgtgtccagcaactcgtccggcgacacgagctactcgaatgtggaagaaaacctagaggacagcagcgatgagtcggaaacggacagttccgattactctgactgggtggcggatactcctggcccgaatctggaaccaccaaaacgatccaagcgtaagccactctcacggcgaccccggagtagtgatgacagcagcgatgatgagcgagcgggcagatccagaggtgggcaggttacggcccggaaggttggacgtaaaactgttttgtttccgcccacagatgcaaatggagagataccggagctttatcgtcccgctgagtggctatctgaggtgattccacgtaaggcaccctattacccccagatgggtgatgaggtagtctacttccggcaaggacacgcaaagtacttggatgcagtccgcctgaaaaaggtctacaagctctcgcacagctcggagccgtggaactttcacacactgcgcgaccacgagctggtgcgtgtgattggaatcaagtacgaaatccgcccaccccgattatgttgcttgaagttggccatcatcgatgaggagggcaacatgacggggacaacgttcaagatcaagtaccatgacatgcccgacgttttggactttttagtgctgcggcagaccttcgatcttgcagtgcagcgcaactggagcattggtgaccggtttcgctgcatgattgtcgatggctggtggatgggtcagattgaatcgcgccacgccctctctgctgacttccccgactcgtccttcatgtgtttccgcgtgcgctgggataatggagagtatgagtttatgagtccctgggacatggaacccatcgatcagcaaagagtaccggacgaggtgggaggtgctgttccagttctaccggaggagattcgcgccactctataccagcccaagtccgaggaatggcacagaggggatcgcgatggcacctgcaggcgaattatcaatggattggagcaggtaagcatttaa

SEQ ID NO: 303 - protein, 1225 aa, Drosophila melanogaster
METRQPSSGDDLKPELYFLISKFLAAGPLEETAKVLIRELEEKKVLPRRLDWQGNEHEQTFEELERKYKHIGANHLLEICSRLGPLVDRELPPSVPGINSLLGTGRQNLLRTKETVYCHRSLRDYCTRLNGVSLPDSVLTKPTHNLDRVLTGREHGGEVRRKLLVPTDLYRRTKLLRRTVGHLSSVYCVLFDRTGRYIITGADDLLIKIWSAADGRLLATLRGASSEITDIAINLDNTMLAAGSLDHILRVWDMQTTSPIAVLSAHTGMITSVNFCPSPRSDLKYLVTTSTDGSIAFWQYSTPRGQKITFAPKPTQYHEKLRPGQAQMMCTTFSPGGIFLAAGSADHHVRVYMMGEDGPKRILETEAYTDAVDSVQWSHRGLRFISGSKDGTAHIWTFESQQWKSSKLCMTERLASCPEPEEGKRLKVTMVAWDASDRYVITAVNDFTIKIWDSKSAKLHRVLRGHKDELYVLESNPRDEHVLLSAGHDGQVFLWDIEQGVCVANFLNDIDGQGHGSVFDAKWSPDGTMIAATDSHGHILIFGLGVCIEKYKMLPTELFFHTDFRPLLRDAQHHVVDEQTQIMPHLMPPPFLVDADGNPHPSRFQRFVPGRESCSLDQLIPNLTVGVDGVVIDDGGAGGDAVVAAAPAEAPPAALPPAAAGGPQGANYSHIDRMIAALANRQSVNVNANDANPTNGNQSFERLTNRQMPDSNGRQSSRGNVLGSRLSTPRQGWGAAAAAPVEDQAGPSQPPAEPAAEPGQAQVQQALPLKFIRRTYVRPMKYPQLQNLKQTIYSAGQFEKQEYKREMRRRPIMINTASAASSQQPGSVGRPRNTRGNGGGARAGRRRGPQPAGGQPQPAYRTRAVRDQEPEHYDEVAPPPEEEEEDVSSNSSGDTSYSNVEENLEDSSDESETDSSDYSDWVADTPGPNLEPPKRSKRKPLSRRPRSSDDSSDDERAGRSRGGQVTARKVGRKTVLFPPTDANGEIPELYRPAEWLSEVIPRKAPYYPQMGDEVVYFRQGHAKYLDAVRLKKVYKLSHSSEPWNFHTLRDHELVRVIGIKYEIRPPRLCCLKLAIIDEEGNMTGTTFKIKYHDMPDVLDFLVLRQTFDLAVQRNWSIGDRFRCMIVDGWWMGQIESRHALSADFPDSSFMCFRVRWDNGEYEFMSPWDMEPIDQQRVPDEVGGAVPVLPEEIRATLYQPKSEEWHRGDRDGTCRRIINGLEQVSI

SEQ ID NO: 304 - DNA, 1014 bp, Drosophila melanogaster
  CDS (1)..(1014): CT20122
atgaacaagccgcaaaagcccatcaaggtgaagcgcgccaagcggaccggatgctccaggattcagccgcaggaattcgtggaggctcaggtggagaacgcgcgcagggcggtggagcgtaagctgatctacctgtccgagtcgaacagagccagtgcatccactcgggcggccaagcgaagcacggctggcgcaggcggaggagcagggcgggaaggatcgagcatggctggccatgcccatggtgagcgtcgcaggcgcagcaagaggagtctgctacacgctccagctcaggaggagaccgacgaggaggagagttcgccgctggagaagacgaacaactacgataacagaagacgcagcagttgcaatctattgctatctcctcgtcgcaatggcctcacgccccggaactacgaggccgaggccgaggcagcggaaatggaagccataatggccgcacagcaagcctccaacggagcgacgaagcccgatcatgatgaaggagatggcggggagtatcagggcggaccgtttggccgactgcagctgaagccgctgggcagctatgccacggaccagcagctgcccagctactcgtgcggcgtgtgcggtgccaagtttcacatccgatcgctgctgggcgcccaccggcacacccacgacgatgacttcaaggtgcgcttccgtgcacggcgaccgcgggagagcagaaccaccctgaccaccgtccatctgtgcaagtactgcgatcgctccttcgacctggaacgcacgctgcacatccatctgttgagctactgcaagaagataccgccgcagcagcgccgcaagctggccttcacggaactggcgcacgagaagaaggcgccgttgcccaactttcagcgggcgcagcagccggttcaccaccagggaaacagtgccaccaaccagcaggatcagatgacccagcaggaaaaacttcagaagattatcatgcgcgagtcggcagtgcacgagcgctggcgctag

SEQ ID NO: 305 - protein, 337 aa, Drosophila melanogaster
MNKPQKPIKVKRAKRTGCSRIQPQEFVEAQVENARRAVERKLIYLSESNRASASTRAAKRSTAGAGGGAGREGSSMAGHAHGERRRRSKRSLLHAPAQEETDEEESSPLEKTNNYDNRRRSSCNLLLSPRRNGLTPRNYEAEAEAAEMEAIMAAQQASNGATKPDHDEGDGGEYQGGPFGRLQLKPLGSYATDQQLPSYSCGVCGAKFHIRSLLGAHRHTHDDDFKVRFRARRPRESRTTLTTVHLCKYCDRSFDLERTLHIHLLSYCKKIPPQQRRKLAFTELAHEKKAPLPNFQRAQQPVHHQGNSATNQQDQMTQQEKLQKIIMRESAVHERWR

SEQ ID NO: 306 - DNA, 2499 bp, Drosophila melanogaster
  CDS (1)..(2499): CT20269
atgtggagtccgacgcactgtagtgtaacggtgcagcgagcgcgtgggctgctcaccaagggcaagaatggcaccaacaactgcttcgtcaccattgctctgggcaaggagaagtaccagacgtccgtcaaggacaaggccgagacgagcgtcaactggaacgaggagtgcgaactgaaaattcccgatcagggtaatcgcgccgagctcactttgacctgcctgcacaggaacaatctgggcatcgatgagttcctcggccaggcgacgctgccgctcaacgagatggatgtgtatgaccggccacgcgccaagtggttcaagctggagagcaagcccggcaaggagaagaagaacaaggagcggggcgagctggaggtgcgcatcgccttcgtggtcaagtccggctcgctgaccgatctcagcaagaaggacaagcacaagtcttccattggccagctggccagctccgtgggtggcagtctgttgtccatcggcaacggcgagaagcggcgaggcatcaagaagctggctggctcgcttagctctaagctgcacatccgtagcaagaagaagaaccaggaggcgggcgccgacgatagtagctccttcggcggctccttcgccagcctgggcacgcccaacagctccaacggcaggggccagaatggtggcagtggcaggcgacgtggcggccagcgggcgggcgaagccgatcccggcgtgatcagcgaggacgaggacgagtttgtgttcgacaacctctcgcacaagagctccggcagctcacttaacatccaacgcatcggcctgcagccgccgccagtcggtacgcccaactttacgccgcgccacccatcgcccctgctgaacaacggagttagtggcgtcggaagcggcagcgcgaaaggtaagcaagcggttttgccagcgacgctcgatgaggatgcgtccatcgacgcggagatggaacagcttgagctagatttcagtgttcgtgcccacgcccgcgcaaacgctaacgccagcgccagcggaaatgccagcaccctgccgcctccctcgaaaccaccgcgcattcccctgtcgcaggtggacgagcagccggctgccgggagtctggagcgggaaaagccaaaggagaagccagccgaggtggagagcgacaaggacgagtgggcgtcaaagttgtatggcggtggaaagtacctggagatcggtagcagtaactcattgaaacgccgcagctgggaggaccgagttccactccccgccagtgttgaggagccgccgccattgcactcgtccagttcgtcgtcgagttccagttcggatagcgatgacgatgacgagaaaccgccgcaggctgctcccccaccagtacccgtgccggcttctctaccagttccatctgcagctgcttctactgcttctgctgacccagtggtggctacttcatcgtcgctcttctctcccgacgtggagcaccgcaactttgatacctttaacgccagtttcgccaagtacgagcagcgaaacagcactgctatttttgcagatgaacccgagctggaagacctgacagtggagctggagaagccggcgcccactcccacagcacgccccaaaccgcagccacgtgctacggccgatctgagggcggaggaggagaaggctaaggaagaggctgcacggcaactgcgtgccgaggaggatgcacgcttggaggcagagctgcgtctgaatgaggagcgcctgcgcgaagaagaggaggctatgcagcgagagctggaggaagagaaggagcgccaaaagcagctgcagatggatgagcagcagcggcgtgaggccaagcgctgggaagaagatcagaggcttttgagctttgccaaacgatccacatccctcgaggagccagtcccagagaagcaggagctgaagcatgagagggagctcgtggccaagcaggagccggagaaaacgctggatacggcagagccggagccggagcacaacttcctaacgcccgaacagtcgcccaaggagttccagacgaatggcagtggcagtggcagcggggagcgctgggagaaacgactgggcaaattcaaatacggcaacaagcgagataaatacaacaacgacaacgacagcaactcgcccagtcccaagtctacggagcgcatcataattggtcacgagaagtcgggatcgcatgcggatcgccgctcggagatatccgcccagctggccaagaaatacgagggcaagtcgcgcgaggaactaatgctaattgccaacggaatggagaacgaggctctgctgcagcggcagcgcgtgaaggagctggaagactatctggacaacctgctgctgcgcgtgatggagacgcacccgaagatcctgcagaatccgtattcgcgcaccacgtccgccaagaggtacggcacctggtcgttctggtcgtcctctcgtactagagccacgcccacccactaa

SEQ ID NO: 307 - protein, 832 aa, Drosophila melanogaster
MWSPTHCSVTVQRARGLLTKGKNGTNNCFVTIALGKEKYQTSVKDKAETSVNWNEECELKIPDQGNRAELTLTCLHRNNLGIDEFLGQATLPLNEMDVYDRPRAKWFKLESKPGKEKKNKERGELEVRIAFVVKSGSLTDLSKKDKHKSSIGQLASSVGGSLLSIGNGEKRRGIKKLAGSLSSKLHIRSKKKNQEAGADDSSSFGGSFASLGTPNSSNGRGQNGGSGRRRGGQRAGEADPGVISEDEDEFVFDNLSHKSSGSSLNIQRIGLQPPPVGTPNFTPRHPSPLLNNGVSGVGSGSAKGKQAVLPATLDEDASIDAEMEQLELDFSVRAHARANANASASGNASTLPPPSKPPRIPLSQVDEQPAAGSLEREKPKEKPAEVESDKDEWASKLYGGGKYLEIGSSNSLKRRSWEDRVPLPASVEEPPPLHSSSSSSSSSSDSDDDDEKPPQAAPPPVPVPASLPVPSAAASTASADPVVATSSSLFSPDVEHRNFDTFNASFAKYEQRNSTAIFADEPELEDLTVELEKPAPTPTARPKPQPRATADLRAEEEKAKEEAARQLRAEEDARLEAELRLNEERLREEEEAMQRELEEEKERQKQLQMDEQQRREAKRWEEDQRLLSFAKRSTSLEEPVPEKQELKHERELVAKQEPEKTLDTAEPEPEHNFLTPEQSPKEFQTNGSGSGSGERWEKRLGKFKYGNKRDKYNNDNDSNSPSPKSTERIIIGHEKSGSHADRRSEISAQLAKKYEGKSREELMLIANGMENEALLQRQRVKELEDYLDNLLLRVMETHPKILQNPYSRTTSAKRYGTWSFWSSSRTRATPTH

SEQ ID NO: 308 - DNA, 4899 bp, Drosophila melanogaster
  CDS (1)..(4899): CT21021
atggttgctgatgataatttctatttccagatttcgctttataggcgtgtcctagaaccaaggttgggcacaaatcaaaatccaaatgagcagcacctgagcgatccagctgcctcgccctccacctccagtccagccaacaacaacgcaacagctggagcggcaacaacatcaacagccactgtaatcactgcggtgggtggagcgggcggtggcgtagcggcagcgggagtgggcgtggttacaccaacaaagagcccacagcgtaacgctttccaggaagatgcttatcaggcgaacctggctggcggcgatagcgtcgataacattgaatcagctcaattggatggtggcaatccgagtggtggatcgcccggccagcgtcactcgataaactcggcggaatacacatccacaccaaagacgactcgtagcggtccgaatggtagcaccacggccagtggaacaacgtcgcccattaattaccagctgcccggcgatgactatccgtatggcatagaatatgagtcacagcaactgctataccaacagcaacagcagcagcagcaacaacagtcgcaacaacaacaacagcagcagcagcagcaacaacaacaattgccagtaggcgatgtggagcaatcgtcagcggtaacataccaaagtttgccggtcagtcgccagagttacgcttcaccgccagctctgatcattccccagcggcagtcgctgcttccctggggagctcattccaggagttcgatcatcaacgtcctgcccagttacacgcaagccgagatgcatgccttggccgccagggtggccagcgtggagacctcagctccacgacctggtgagatcgtgatgcgtaatctgttcagtgactttacggcccaagctgagaagaagatcgagctggtgatgctggagagtgccgataagaatctatcgaagctgctgcagcgcggcgaggatcagcaattcgatcagttactatccgctctgggctcagtggccgagcactgcctgccatcgttgctgcacaccttgctggcctggcatcgtcgccagttgtccgacatggagatcaagaatgacctcaagaaaccagcaccgagtggcagtagttcgcaggcggcaaccaataagcccaccgtcgatctggactttcagctgcagcgtagggaagcggctgtggagttcattttttgtctggctctcatcgagatactcaaacagttaccgtatcatccgggccacgaggatttggtgcgcagcatcgagaatctggcctttaagcacttcaagtacaaggatggtttgcagaacaatccaaatgccctcaatatccacatgattgcggatctgtatgcagaggttatcggtgtgctggctcaaagtcgatttgcatcggtgcgcaagcgtttcatgagcgagctgaaggagctgcgcggcaaggaggtgtcaccaacgaccacccagagcatcatcagtctgctgatgggcatgaagtttttccgggtcaagatggtgcccattgaggagttcgaggcgtcctttcagtttatgcacgagtgcggtcagtactttttagaagtcaaggataaggatatcaagcatgcgttggctggactgtttgtggaaatcctggtgcctgtggcggcggccgttaaaaacgaggtgaatgttccgtgcgttaagaactttgtggaactgctctatgtgcagaccttggatgcctccaccaagtctaagcatcgattggctctctttccgctggtcacctgcttgctctgcgtctcgcaaaagactttcttcctgaccaactggcattacttcctggccatgtgtttgagtaatttgaagaaccgcgatgccaaaatgagccgcgtggctctcgagtcactgtttcgcctactgtgggtctatatgatccgcatcaagtgtgagtccaactcggccactcactcccgtctccagagcattgttaactctctgtttcccaagggctccaaaggagttgtgccacgtgacactccactgaacatctttgtgaagatcatccagttcatcgcccaggagcgtctggactttgccatgcgcgagatcgtttacgatttgctgtgcgtaggtcgttcgattaagctaatcctgaatccggaacgcatgagcatcggattgcgagccttcttggtcgtcgccgattcactgcagcagaaggctggtgagccaccgatgcccagaacggtgccagtccttccatctggtaacacactgcgagtaaaaaagacgtttaacaagatgtatgttttgttaacggatgacaccgccagaagtattggaatgtctacgtactttccacatgtgcgtagggtttttgtggatattttgagagctttggatgttcattatggtcgtccactgatgatgaccaatacacagaaccagaacaaggagccggacgagatgctctccggtgaaagaaagcctcgcatcgatctcttccgaacgtgtgttgccgccgtaccgcgattgatacccgatacaatgacccctcacgagcttgtcgacatgctctccagactgtcggtccacatggatgaggagttgcgaattctaacccaccagtcgcttacgactttggtcatagatttcccggattggcgtcaggatgtcgtgcacggttacactcagtttctggtgcgcgacgtcaccgacacctatccgcagctgctggagaactgcacgcgcatcctgttcactttcctcaacatctggcggtgtgccacaaatgtgaacgggaataacactaccagtgctcctagcggagcaaccaatgtggtcaatacatcacaagccaaaatgactacggccaccacaacgacaacggtggtgcaggctacagtggttcaggtcacatcagcgccagccaaggacaccgccagcagtcagttgtccaagcagcagcatttgaatacggccagtagtgctgcatccagcataactacctcaagcggaatgtccagtatcacgcaacacaccgtgctgaacatggccagcgatgtgggcaagaagaatgaaatccctctggccaccactctgcattttgtggagggctttgccctggtgctactctgcaactatcgcacgtatctgcgcaagctggccgcgttgatactcaaggaagtaaagaatctgatgcgagcattgggtatcccagaaacggagccgccgctcatcgatgtcatggatcgttgtgtgcctggcatcatagagaagtgcctgccacagctgccgcagacggagaagacggctattctgaatgccaattgcattgatctgcagtggatagctgaaaggtcgagtggagtgtggctagctggactgacagatgacaactcgaaatcctctacgtctacgcttaacctctcgcagtccagttcaacaccgaatgcctcggcaacggcggccagctctccgcagcttccgttcgatccctgggcgacttgtttgtttggattgctggaacgacagaatgtcctgcaacagtgcccatcggctgtggcgcaggcctggccaatttgcttcacgcgcctgaatgcgttgtacagtgtcattgatcccacccccgtgagcgacaatcgagcttcgttgctgcgaagttcggcgcccaccaagaaagtgcccaccgagagccagaaggattcatatttgcgtctttggaggaatcaggtggcctgtgccatgcgactagtgccccaaattcccagtgtcgccgttcgatgtgcttcacctgacttgagtttgagtttacaagatcagtcggactcgcgttcgctgtccgattccttggacaatataccatccaatgtgtttgggcccgagggaatcgtcacgcgtttcacgctgccactctcctatggacgcaaagaggcgcgccaaaagcgacttggctcatcgccggactccctgaacgccgatcgcagtgacaagtcagcgatgggcagcgcatcaccccaagcgctctacaaactggtggtgccgctcctccggtgcgaggtcgtcgatgtgcgagatgccgccgtgaatgccttgggtctgataaaccacgatgcgctcaaggatttgatggaggagctggtggtgtacatccgtgaggcggtggactgcaagcaggagaacatgcgcaggcgacggcgacgcgatgccctgcgtctgcaggtggtgcgagtgctggagaagattgccgagaacggaacattcggtgtgagcacctgtgtgctggaacgcgacacgatgtcgctgcatcccacctttgtgctgtatatctcgggcgccatgggctatctaacgtctgagacggacaaggataatctcagcattcgcgaggtgaaggcccacttttgcaatttcatacgcaaaatgattaagaacttcccactcgaggcctgtgccacgctactctcccgagtcctgaagcgtaatctcttcaatttatttgccgcctggtgcggcagcttctccaagccacttggttacaccatgcagagcgaccatacgctcgaggaggagaagctgcagttcagcgccctgcaggcaactctgctctgttgcggtcagatcttcaatccatcgtatctacaagatgatagcattatttacaagtggctggacatgctgctgacctccaaaaacgaaaagatttaccagctggcaagggatacggtcgttctgttgctggagtccaatccggatatcggccaactattggaatgggtcatagaccgttgctatacatcgacaccacgtgaggcagatgcctgtttcctggccctggcctcgatctttagcgccaaccaagtacattacactccgcccacctcacttgccgccgtataa

SEQ ID NO: 309 - protein, 1632 aa, Drosophila melanogaster
MVADDNFYFQISLYRRVLEPRLGTNQNPNEQHLSDPAASPSTSSPANNNATAGAATTSTATVITAVGGAGGGVAAAGVGVVTPTKSPQRNAFQEDAYQANLAGGDSVDNIESAQLDGGNPSGGSPGQRHSINSAEYTSTPKTTRSGPNGSTTASGTTSPINYQLPGDDYPYGIEYESQQLLYQQQQQQQQQQSQQQQQQQQQQQQQLPVGDVEQSSAVTYQSLPVSRQSYASPPALIIPQRQSLLPWGAHSRSSIINVLPSYTQAEMHALAARVASVETSAPRPGEIVMRNLFSDFTAQAEKKIELVMLESADKNLSKLLQRGEDQQFDQLLSALGSVAEHCLPSLLHTLLAWHRRQLSDMEIKNDLKKPAPSGSSSQAATNKPTVDLDFQLQRREAAVEFIFCLALIEILKQLPYHPGHEDLVRSIENLAFKHFKYKDGLQNNPNALNIHMIADLYAEVIGVLAQSRFASVRKRFMSELKELRGKEVSPTTTQSIISLLMGMKFFRVKMVPIEEFEASFQFMHECGQYFLEVKDKDIKHALAGLFVEILVPVAAAVKNEVNVPCVKNFVELLYVQTLDASTKSKHRLALFPLVTCLLCVSQKTFFLTNWHYFLAMCLSNLKNRDAKMSRVALESLFRLLWVYMIRIKCESNSATHSRLQSIVNSLFPKGSKGVVPRDTPLNIFVKIIQFIAQERLDFAMREIVYDLLCVGRSIKLILNPERMSIGLRAFLVVADSLQQKAGEPPMPRTVPVLPSGNTLRVKKTFNKMYVLLTDDTARSIGMSTYFPHVRRVFVDILRALDVHYGRPLMMTNTQNQNKEPDEMLSGERKPRIDLFRTCVAAVPRLIPDTMTPHELVDMLSRLSVHMDEELRILTHQSLTTLVIDFPDWRQDVVHGYTQFLVRDVTDTYPQLLENCTRILFTFLNIWRCATNVNGNNTTSAPSGATNVVNTSQAKMTTATTTTTVVQATVVQVTSAPAKDTASSQLSKQQHLNTASSAASSITTSSGMSSITQHTVLNMASDVGKKNEIPLATTLHFVEGFALVLLCNYRTYLRKLAALILKEVKNLMRALGIPETEPPLIDVMDRCVPGIIEKCLPQLPQTEKTAILNANCIDLQWIAERSSGVWLAGLTDDNSKSSTSTLNLSQSSSTPNASATAASSPQLPFDPWATCLFGLLERQNVLQQCPSAVAQAWPICFTRLNALYSVIDPTPVSDNRASLLRSSAPTKKVPTESQKDSYLRLWRNQVACAMRLVPQIPSVAVRCASPDLSLSLQDQSDSRSLSDSLDNIPSNVFGPEGIVTRFTLPLSYGRKEARQKRLGSSPDSLNADRSDKSAMGSASPQALYKLVVPLLRCEVVDVRDAAVNALGLINHDALKDLMEELVVYIREAVDCKQENMRRRRRRDALRLQVVRVLEKIAENGTFGVSTCVLERDTMSLHPTFVLYISGAMGYLTSETDKDNLSIREVKAHFCNFIRKMIKNFPLEACATLLSRVLKRNLFNLFAAWCGSFSKPLGYTMQSDHTLEEEKLQFSALQATLLCCGQIFNPSYLQDDSIIYKWLDMLLTSKNEKIYQLARDTVVLLLESNPDIGQLLEWVIDRCYTSTPREADACFLALASIFSANQVHYTPPTSLAAV

SEQ ID NO: 310 - DNA, 666 bp, Drosophila melanogaster
  CDS (1)..(666): CT21292
atggcctccattgacgagggctcgcgcgttgagcggagattctgcgcagtcggcaaccacacgctgcggaagccgtatcgccaactgaacaacaaatatttggtgcgcttcgcctgtttgctgaacagcgaaattcgggcgggcaacctcatctgctgcaagtgctacacggacctggtgcgactctaccggaagaagaacgacaatgccaaacggcacaagatggccagggagactgccgcgagcattacggacgtcagcggcagtcagtcatcgtcgcaccaaagtgcgccctctttgcatgtctctggccaaagttccgaattcggtgcctcatacagtgaggggggcattgtgactcccgatgaagagctgtgctcccacagaagcttaagtcaagattcagacaatgtgcccactaccagcgctgcagcgatccaaaaacgccagcttgcgagggcaaacctaatggtgaaaccatcgcagaggctgagcttggcccagactactccggattgcgacgactacgaccccaactcgaatctcagtttgaacgccgtgaatggcacgcgactgccgcacattcagccgattccaaagaggcgcccgaccgtcctggacaagcagtccatggatatttacttgatgggaaccacaggtggttaa

SEQ ID NO: 311 - protein, 221 aa, Drosophila melanogaster
MASIDEGSRVERRFCAVGNHTLRKPYRQLNNKYLVRFACLLNSEIRAGNLICCKCYTDLVRLYRKKNDNAKRHKMARETAASITDVSGSQSSSHQSAPSLHVSGQSSEFGASYSEGGIVTPDEELCSHRSLSQDSDNVPTTSAAAIQKRQLARANLMVKPSQRLSLAQTTPDCDDYDPNSNLSLNAVNGTRLPHIQPIPKRRPTVLDKQSMDIYLMGTTGG

SEQ ID NO: 312 - DNA, 1779 bp, Drosophila melanogaster
  CDS (1)..(1779): CT43217
atgagcctgaggaagtggggataccgcctgctgccgggtctaaagtggctgcacggttatactggccaagatgcagttgcggatctgatagccggagtgacggtcggcctgacggtgttgccccaaggactggcctacgctacgctggcgggactggagccccaatatggtctgtactccgcctttgtgggcggtattatatacgccatgctgggcagctgccggcaggtgaccattggacccacggctttgctcgcactgatgacaagccggcacacgggatttggactgggatcgggtccagcgtacgcgatacttttgtgcctcatctctggtgttgtggagctgggtatggcagtgctgaaactgggtgccctggtggacctgatatcactgccagttaccgtgggattcacctcggccaccgccgtcatcattggcacctcgcagctaaagggtttgctgggactgcgtggtggatccgggtctgatttcatcaataccatgcgctccgtgttcggaaatctacacaaaaaactaaaagacgttaagctggatggtcgaatccggaacttgcgaacacagcagcttgtaagtggtagcatctgggtaataggcaccggtcggaatgcgctggtcgtactggtgaccagtgtgctggcctacagcacatgtgagcagatggagagctgcccgttcatccttactggaaaggtcaaaagcggtctgcccaacgtttcactgccaaagtttgagaccaccatactggacaggaatggcactgagatcagacagaactttgaacagatgctctcggaactgggcccttccatgctaatcctacccattatagctgtgcttggaaatgtagccatttcgaaagcctttggaggagctggactgagtccgacgcgggaactggttgcactttccatgagcaacatttgtggcgcgttctgcagctccatgccggtgacaggatccttctcgcgcagcgctgttaaccacgccagtggagtaaggacgccgcttggaggctgctacacaagcgtgctggttctgttggcactcggcctcctggcaccttatttccagtacatcccgaaggctgctctcagtgcggttatcatctcggcggtgatattcatgattgagttcgaggtcattaagccgctgtggcggtgcagccggcgggagctgcttccaggtgccattacattcgtaatgagtctggctgtgggcgtcgagatcggtcttctgctgggcgtgagtaccgatgtggcgtttctggtttaccgagccgctcgacccgtactgagtgtctccaaactgcaaaccaccaatggcatcaattatattctgattcgccctaagcacagttcactgtacttcccggcagtcgaatgggttcgttcgggcatctcaaaagctctgaccattcatggaaccgcacctgtggtcttggattgcgcccacgtgcatgaattcgattttacggcagctcgcggaatgggctcattgcaaaaggagctcgccaaggcgaatgcacctttgtttctgatgagtgcggacaagactattggtgtgatcctcaaggagtcgactaatattgatttccccacgatagactgccccgatgatctggaattccttttggagcaaactgccgactacgttctgcatttgcagatttcagcaccgctcgtcgagtcccgcttggtacatggcgatagtggcgaaccaactgaactgagtaaacttaatggaaaatcttcgtaa

SEQ ID NO: 313 - protein, 592 aa, Drosophila melanogaster
MSLRKWGYRLLPGLKWLHGYTGQDAVADLIAGVTVGLTVLPQGLAYATLAGLEPQYGLYSAFVGGIIYAMLGSCRQVTIGPTALLALMTSRHTGFGLGSGPAYAILLCLISGVVELGMAVLKLGALVDLISLPVTVGFTSATAVIIGTSQLKGLLGLRGGSGSDFINTMRSVFGNLHKKLKDVKLDGRIRNLRTQQLVSGSIWVIGTGRNALVVLVTSVLAYSTCEQMESCPFILTGKVKSGLPNVSLPKFETTILDRNGTEIRQNFEQMLSELGPSMLILPIIAVLGNVAISKAFGGAGLSPTRELVALSMSNICGAFCSSMPVTGSFSRSAVNHASGVRTPLGGCYTSVLVLLALGLLAPYFQYIPKAALSAVIISAVIFMIEFEVIKPLWRCSRRELLPGAITFVMSLAVGVEIGLLLGVSTDVAFLVYRAARPVLSVSKLQTTNGINYILIRPKHSSLYFPAVEWVRSGISKALTIHGTAPVVLDCAHVHEFDFTAARGMGSLQKELAKANAPLFLMSADKTIGVILKESTNIDFPTIDCPDDLEFLLEQTADYVLHLQISAPLVESRLVHGDSGEPTELSKLNGKSS

SEQ ID NO: 314 - DNA, 1017 bp, Drosophila melanogaster
  CDS (1)..(1017): CT21476
atgcattttcttttcacttctctagtcctcaaccagcagatcctgcagaatgtcaaccaatcctggcagacgttggcaaatacggccaacacggtggactactcgtcacacctgctctccgccacactgcccatctccatacagcacttcctcaagtactcggagacgatcaagaaggagtccaccggcgatgtcctgaagaacggcaccaatttggccagcctggcgctggggggcgtggccctaacgcccagcaacaacggtgcgaatggcggccaccacaacggactggtgggcatggaccatggcggtcacatgaccaacatgacggacgccaacggagcggcgctgacgaacggagctagcaacggagtgaatggcaatgctaacggcactgtgaccaatggtggcgccggcgccgtctcgagctccggatctgtgggcacaacaaacgccagcggcggcacaggcacggccagcggcaagaagaccaaaaagaagaaaccaccaaaggagaagaagccgcgccccaaaccgggagaaatccgcgagacaaaggcgctggatggctcgacgctctactgctgcccggagtgccaaatggcctacccggatcgcagcctcatcgagcagcacgtcatctcgcacgccgttgagcggcgcttcgtctgcgacatctgcaatgcggcgctgaagcgcaaggaccacctgaccaggcacaagctctcccacataccggacaggccgcatgtgtgcaatatctgcatgaagtccttcaagcgcaaggagcagctcactctgcacattgtcatccattccggcgagaagaagcatgtttgcattgagtgtggaaaaggtttctatcgcaaggatcacttgcgcaagcacacacgatcgcacatcgcccggcgtgtcaagtcggaggtgtcggcgcagaacgttaacggatccgccggaggcggtggcggcggtggaggcggcaacagtgcgcagagcaacgcgctgcacggctcctaa

SEQ ID NO: 315 - protein, 338 aa, Drosophila melanogaster
MHFLFTSLVLNQQILQNVNQSWQTLANTANTVDYSSHLLSATLPISIQHFLKYSETIKKESTGDVLKNGTNLASLALGGVALTPSNNGANGGHHNGLVGMDHGGHMTNMTDANGAALTNGASNGVNGNANGTVTNGGAGAVSSSGSVGTTNASGGTGTASGKKTKKKKPPKEKKPRPKPGEIRETKALDGSTLYCCPECQMAYPDRSLIEQHVISHAVERRFVCDICNAALKRKDHLTRHKLSHIPDRPHVCNICMKSFKRKEQLTLHIVIHSGEKKHVCIECGKGFYRKDHLRKHTRSHIARRVKSEVSAQNVNGSAGGGGGGGGGNSAQSNALHGS

SEQ ID NO: 316 - DNA, 1761 bp, Drosophila melanogaster
  CDS (1)..(1761): CT21525
atgtccaacgcagacgtgcaatttaactacggccagcagggaaatggcgacaacttcaacgacgacagcaaccagcagcaggatgaggatgaccagtacaacgaagatggcggcggcaagatcgaaaacgtcggcgagagccccaaattcgttcggttgcgcggcctgccctggtccgcaacgcacaaggagatactcgactttctggaaaacgtgaatgtgactaatggctcggcgggcattcacctggtcaccagtcgggtcgacggcaagaacaccggcgaggcgtacgtggaggtggccagccaggaggacgtcgaagaggctcgcaagctgaacaaggccagcatgggtcaccgctacattgaagtttttaccgccacgcccaaggaggccaaggaagccatgcggaagatcagcggacacggcacggccttcgttgtgaagcttcgtggtctgccatatgccgtcactgagcagcaaatcgaggagttcttctctgggttggatatcaaaacggatcgggagggcatactttttgttatggacagaaggggtcgtgcaactggggaagcttttgttcagttcgaaagccaggacgacactgagcaagccttgggccgaaatcgggaaaaaattgggcacaggtatattgagatattccgcagctcgattgctgaaatgaagagggccacaggcgccggtggcggtgtcggaggacgccctggcccttatgacatacgtgatcgtggtgccaaccgtggtggcaatgatttcggcggagggcgcaatgattggggcaacaatggcaactttggcgttggtgccaacaacatgctgggcttcaacaatctgccaagcctgatgaactcgggcaactttggaaacaaccaaggtggaaataatggaaattttggaaataactctggacccagcaatttcggcaactttggtggcggcaacaacggtggaaattccggcaactttggaaacgacagtggtaacagcggaaactttggaaacttcggcaataatggaggcggaaacttcggcggcaacaacaacggcggcggtggtttcaacagtggcaacaacttcaattctccaggtggcgttaataatttcggcaacaatggcggctccaattttggcggcaatggtggaggaggtttcaataacggcggaaacttcgtatcctcgagtggtgttggcaactttggcccgatcggcggcggtcgcaacaataacaacggaaatttcggaaactctggattcggtaactttggaggaaacaacaatgtcggctcgaacttcggaggaggcaacaacggcggtggcggcggattcaacaatggctcgaacttcggcggcggcaactcaatgggcggtggtggcaatttcggtcccatcggcggcggtcggggcaacgacatcgagtattatacaatccacatgcgcggacttccctacacttcatttgaaaacgacgtttttaagttcttcgaaccaatccgaccagctaacgtgcggataaactacaacaagaagggtctgcacagtggcactgcggatgcctacttcgacacctacgaggattcccaggtggccatgaagcgccacagagagcagatgggttcgcgatacattgagctgttctacgacggaaagacgcgtggactcaatggtggggaacacggcggtggtaacggtggcggcggaatgggaaacaatggcggcggaaacttttcgcggcgcatctaa

SEQ ID NO: 317 - protein, 586 aa, Drosophila melanogaster
MSNADVQFNYGQQGNGDNFNDDSNQQQDEDDQYNEDGGGKIENVGESPKFVRLRGLPWSATHKEILDFLENVNVTNGSAGIHLVTSRVDGKNTGEAYVEVASQEDVEEARKLNKASMGHRYIEVFTATPKEAKEAMRKISGHGTAFVVKLRGLPYAVTEQQIEEFFSGLDIKTDREGILFVMDRRGRATGEAFVQFESQDDTEQALGRNREKIGHRYIEIFRSSIAEMKRATGAGGGVGGRPGPYDIRDRGANRGGNDFGGGRNDWGNNGNFGVGANNMLGFNNLPSLMNSGNFGNNQGGNNGNFGNNSGPSNFGNFGGGNNGGNSGNFGNDSGNSGNFGNFGNNGGGNFGGNNNGGGGFNSGNNFNSPGGVNNFGNNGGSNFGGNGGGGFNNGGNFVSSSGVGNFGPIGGGRNNNNGNFGNSGFGNFGGNNNVGSNFGGGNNGGGGGFNNGSNFGGGNSMGGGGNFGPIGGGRGNDIEYYTIHMRGLPYTSFENDVFKFFEPIRPANVRINYNKKGLHSGTADAYFDTYEDSQVAMKRHREQMGSRYIELFYDGKTRGLNGGEHGGGNGGGGMGNNGGGNFSRRI

SEQ ID NO: 318 - DNA, 693 bp, Drosophila melanogaster
  CDS (1)..(693): CT21704
atgtccgaggaagtggtggagtccagcagccaggaggcgagccaggttataccgcaggagcaggaggactgggctgacgatgtcgttaccacaatgccggcccaggaggtcaccgagtggccggaaatcaagcttttcgggcgctgggcctgcgacgacatctccatcagcgacatctcgctgcaggactacattgccgtaaaggagaagttcgcccgctacctgccgcactccgccggacgctatgcggccaagagattccgcaaggcccaatgccccatcgtggagcgcctcaccagcgggctgatgatgaaggggcgcagcaacggcaagaagctcctcgcctgccgcatcgtcaagcacgccttcgagatcatccatctgctaacctcggagaatccgcttcaggtcaccgtcaacgccatcgtcaattccggtccgcgcgaggactccacgcgaatcggacgcgccggcactgtgcgccgccaggcagtcgatgtgtcgcccttgcgtcgtgtcaaccaggcaatttggctaatctgcactggagcacgtgaggctgccttccgcaacatcaagacggtggccgagtgtctggctgatgagctgatcaacgccgccaagggatcctccaactcctacgccatcaagaagaaggacgagttggagcgcgtggccaagtcgaatcgttaa

SEQ ID NO: 319 - protein, 230 aa, Drosophila melanogaster
MSEEVVESSSQEASQVIPQEQEDWADDVVTTMPAQEVTEWPEIKLFGRWACDDISISDISLQDYIAVKEKFARYLPHSAGRYAAKRFRKAQCPIVERLTSGLMMKGRSNGKKLLACRIVKHAFEIIHLLTSENPLQVTVNAIVNSGPREDSTRIGRAGTVRRQAVDVSPLRRVNQAIWLICTGAREAAFRNIKTVAECLADELINAAKGSSNSYAIKKKDELERVAKSNR

SEQ ID NO: 320 - DNA, 1338 bp, Drosophila melanogaster
  CDS (1)..(1338): CT22195
atgtacggcaaatcaaagacatcggcggttccatcggacgcccaggcccgcgaaaagttggccctgtacgtgtacgaatatctgctgcacgttggcgcccagaaggcggcacagacattcctctcggagatccgatgggagaagaacataacgctgggcgagccgccgggattcctgcacacctggtggtgcgtcttctgggacctgtactgtgcggcgccagagcgccgagatcagtgcgatcacagctcggaggccaaggccttccacgactacggctttgttagctccggctacggagtgaatggaattggaccgggtggaccccacaatgctggcggaccagcgcccagtcccctcgggcaaatgccgcccggcggcgatggcggtccaatgggtcccggcggaccaatgggaccgaatttcttccctaactcgacgatgcgaccgtcgccgccgacgcacgcctccagtccgcaaccgccgccgtcgcaaatgatgccaggccagccgccgttcatgggcggaccccgatacccgggcggaccgcggcccggcgtgcgtatgcagggcatgggcaatgaattcaatggaccccccggccagcccatgatgcccaacagtatggatccgacacggccaggcggagggatgggaccgatgaatccgcgcatgaatccgccacgcggtcctggtggcatgggaccgatgggctatggtggaccaggaggaatgcgcggcccagcaccgggacccggcggaatgccgcccatgggcatgggcggagcgggcggaagaccgccgcaatggcagccaaacgcctcggcgccactaaatgcgtactcgtcatcatcgccaggaaactatggacccggctcgaatggaccgccgggaccgggaacgccaataatgccgtcgccgcaggataacacgcaaggtggaccagtgggcggaccgggcgacagcatgtacgccctgatgaaacccgagttcccgatgggcggagggccggatggcggcggtggcggaggtggtcccggcggaatgggaccgatgggcggcgggccaaattcaatgggccccgtacttaatggcggcggcggtccggacggatccggtttggatggcatgaaaaactcgccggccaacggaggacctgggacgccgcgcgaagactctggcagcggcatgggtgactacaatctgggcggattcggcggacccggcgagaacgatcaaacggaatcggcggccattctgaagatcaaggagagcatgcacgaggaggccaagcggttcgagaaagacacagatcatccggactactttatgccataa

SEQ ID NO: 321 - protein, 445 aa, Drosophila melanogaster
MYGKSKTSAVPSDAQAREKLALYVYEYLLHVGAQKAAQTFLSEIRWEKNITLGEPPGFLHTWWCVFWDLYCAAPERRDQCDHSSEAKAFHDYGFVSSGYGVNGIGPGGPHNAGGPAPSPLGQMPPGGDGGPMGPGGPMGPNFFPNSTMRPSPPTHASSPQPPPSQMMPGQPPFMGGPRYPGGPRPGVRMQGMGNEFNGPPGQPMMPNSMDPTRPGGGMGPMNPRMNPPRGPGGMGPMGYGGPGGMRGPAPGPGGMPPMGMGGAGGRPPQWQPNASAPLNAYSSSSPGNYGPGSNGPPGPGTPIMPSPQDNTQGGPVGGPGDSMYALMKPEFPMGGGPDGGGGGGGPGGMGPMGGGPNSMGPVLNGGGGPDGSGLDGMKNSPANGGPGTPREDSGSGMGDYNLGGFGGPGENDQTESAAILKIKESMHEEAKRFEKDTDHPDYFMP

SEQ ID NO: 322 - DNA, 393 bp, Drosophila melanogaster
  CDS (1)..(393): CT22253
atgcagataacaatcaaggtgctgaagggcaaggactgcaccatcgaggtggcgccgacatcgacgattctggaggtgaaacaccagatcgaggcggaactgcagatatcggctacaaatcaaaagctactgctgttggggcgaccgcttaacaatgaacagacaattgcgtcatatcccaacatcaaggagggcaccaaactcaatctggtggtgataaagccctgtttaagggacagcatcctgcggggattccgcaagcactattcggagcccctagctgagcgtatgaccaatgagtttatggccgacttcgagcggaaaatcaacgagcagagcctggacgacctggagagactggcggacagcatagtcaacagagcggccacataa

SEQ ID NO: 323 - protein, 130 aa, Drosophila melanogaster
MQITIKVLKGKDCTIEVAPTSTILEVKHQIEAELQISATNQKLLLLGRPLNNEQTIASYPNIKEGTKLNLVVIKPCLRDSILRGFRKHYSEPLAERMTNEFMADFERKINEQSLDDLERLADSIVNRAAT

SEQ ID NO: 324 - DNA, 900 bp, Drosophila melanogaster
  CDS (1)..(900): CT22861
atggctcctaccgccaagaccaacaagggtgataccaagaccgctgccgctaagccagcggagaagaaggccgctcccgcagccgccgccgccaagggcaaggtggagaagccgaaggctgaggccgccaagcccgccgccgccgcggccaagaacgtgaagaaggcgtccgaggcggccaaggatgtaaaggcagccgccgctgctgccaagcccgcggcagccaagcccgcagctgccaagcccgccgccgcttccaaggatgccggaaagaaggctcccgctgccgctgctcccaagaaggacgccaaggctgctgctgctccggctcccgccaaggctgctccggccaagaaggctgcctccacgcctgctgccgctcccccagcaaagaaggctgctcccgccaaggccgcagccccggctgctgctgctcccgctccggctgcagctgctcctgctgtcgccaagcccgcgcctaagccgaaggcaaaggctgccccagctcccagcaaggtggtcaagaagaacgtgctgcgtggcaagggacagaagaagaagaaggtctcgctgcgcttcactatcgactgcaccaacattgctgaggatagcatcatggatgtggccgacttcgagaagtacatcaaggcccgccttaaggtcaacggcaaggtgaacaacctgggcaacaacgtcaccttcgagcgctccaagctgaagctcattgtcagctccgacgttcacttttccaaggcatacctcaagtacttgaccaagaagtacctgaagaagaacagtctgcgcgactggatccgtgtggtggccaacgaaaaggactcgtacgagctgcgctacttcagaatcagctccaacgacgatgaggacgacgatgccgagtaa

SEQ ID NO: 325 - protein, 299 aa, Drosophila melanogaster
MAPTAKTNKGDTKTAAAKPAEKKAAPAAAAAKGKVEKPKAEAAKPAAAAAKNVKKASEAAKDVKAAAAAAKPAAAKPAAAKPAAASKDAGKKAPAAAAPKKDAKAAAAPAPAKAAPAKKAASTPAAAPPAKKAAPAKAAAPAAAAPAPAAAAPAVAKPAPKPKAKAAPAPSKVVKKNVLRGKGQKKKKVSLRFTIDCTNIAEDSIMDVADFEKYIKARLKVNGKVNNLGNNVTFERSKLKLIVSSDVHFSKAYLKYLTKKYLKKNSLRDWIRVVANEKDSYELRYFRISSNDDEDDDAE

SEQ ID NO: 326 - DNA, 267 bp, Drosophila melanogaster
  CDS (1)..(267): CT23083
atgccgaatctgcaacaaaccgcatcgcaatcgcagcatcatctgcatccccaccacctgcgaccccaacagcagcaacagcaacatcatcatcatcatcaacaacagcaacaacaacaacacacgcatcatcagcagcagcaacaacaccacagcgacttcccacttcccgatggctgggatatcgccaaggatttcgatggcaagacctattacatagatcatatcaacaagaagaccacctggctggatcccagagattggtaa

SEQ ID NO: 327 - protein, 88 aa, Drosophila melanogaster
MPNLQQTASQSQHHLHPHHLRPQQQQQQHHHHHQQQQQQQHTHHQQQQQHHSDFPLPDGWDIAKDFDGKTYYIDHINKKTTWLDPRDW

SEQ ID NO: 328 - DNA, 1797 bp, Drosophila melanogaster
  CDS (1)..(1797): CT23596
atgtcgtccattatcacgcgcaaggatggcgacgaccagaaattgtccaaaaagcgcgctgccgcctcagattccaaaagtggtggtggaagcgcccttgaagcgcccaagaaatcccgcttcgatgtcccggaaaagaatggcggcggtggtgagaagaaagaagaggtcgccgtgcccgcctcgctgagttccacgcagatcaagctgatgatggcccatgcccagcgggagatcgaggaacgcaagcgggccctgagtaatctaagagacaaggatccgctgctggcgtcagttccatcgatcggaatgccagttgccttagccactcaagcgctggcgaagaagcccacgcccgaggactcggagaaggccaggaagattgccgagttgcaggcacagatcagggccaagcttactggcaatttggctagtttgattcagcccactgcggtagcggccgccgctgcagctgctgctcaagcgcaggagcgacccaaacccctgattctggacgatgaaggacgcactgtggacaagagcggacgtaccattaatattcccacggtgacacctacattgaaagccaacatacgcgccaagaaacgggaggtgttccaacgccaaacgggtttgggtgaacggagtgaatcgggcacttcggcccaggaagaagctattaagtactttgacgaccgcatagccctgaagcccactgttagaaccaagaggacgttgagattccacgagcccggaaagttccagcagctggccgaacgaatgcgcatgaaaagccagctggagcgactacagaatgagatttcgcaaatagcccggaaaacgggcatctcgtcggccaccaaactggcattgattgcccccaagcaggacatgccggacgatgtgcctgccatggagtggtgggactcagttatactgacccaggatctggagacggtagacgacgcaagcggtaagataagcatacgccaaacagccataaccaaccttatagagcatcccacacaaatgaagccgccaaatgagcccttgaaaccagtgtatctgccggttttcctcacaaagaaagagcgcaaaaagcttcgtcgccagaaccgtcgcgaggcctggaaggaggagcaggagaagatccgactgggtttggtggccccaccagagccgaaactgcgcatatccaacctgatgcgtgtgcttggctcggaggccgtacaagatccgaccaaaatggagcagcatgtgcgcgaccagatggccaagcggcagaaggcgcacgaagatgccaacaatgcgcgcaagctgaccagcgagcagaagagcgaaaagaagcagcgcaagctgagggaagacaccagctgcggtgtacatgtcagcgtctatcgcatacgagatctgcaggacaaccagagcaagaaattcaaggtggagaccaatgccaagcagctgcagatgaccggcagcgtggtgttgttccgggattgctgtgtggttgtcgtggagggtgggcccaagcagcagaaaaagtatcgcaggctcatgctaacgcgcattaagtgggaggaggacaacgccaagggcaatgacggccaggacgtgccgaactcatgcgtactcgtctgggaggggactagtcagcgacggcactttggcgagatcaagtttaagatctttccaatggaaaaaatggcccgtgagttttttcagaagcaccaggtcgaacactactgggatctggcctactccggagccgtgcttgaggcctccacggatcagcagtaa

SEQ ID NO: 329 - protein, 598 aa, Drosophila melanogaster
MSSIITRKDGDDQKLSKKRAAASDSKSGGGSALEAPKKSRFDVPEKNGGGGEKKEEVAVPASLSSTQIKLMMAHAQREIEERKRALSNLRDKDPLLASVPSIGMPVALATQALAKKPTPEDSEKARKIAELQAQIRAKLTGNLASLIQPTAVAAAAAAAAQAQERPKPLILDDEGRTVDKSGRTINIPTVTPTLKANIRAKKREVFQRQTGLGERSESGTSAQEEAIKYFDDRIALKPTVRTKRTLRFHEPGKFQQLAERMRMKSQLERLQNEISQIARKTGISSATKLALIAPKQDMPDDVPAMEWWDSVILTQDLETVDDASGKISIRQTAITNLIEHPTQMKPPNEPLKPVYLPVFLTKKERKKLRRQNRREAWKEEQEKIRLGLVAPPEPKLRISNLMRVLGSEAVQDPTKMEQHVRDQMAKRQKAHEDANNARKLTSEQKSEKKQRKLREDTSCGVHVSVYRIRDLQDNQSKKFKVETNAKQLQMTGSVVLFRDCCVVVVEGGPKQQKKYRRLMLTRIKWEEDNAKGNDGQDVPNSCVLVWEGTSQRRHFGEIKFKIFPMEKMAREFFQKHQVEHYWDLAYSGAVLEASTDQQ

SEQ ID NO: 330 - DNA, 378 bp, Drosophila melanogaster
  CDS (1)..(378): CT23626
atggacaagaagagcgcagcgttgtacaaaaagatgcaggccgagattgagtcgtaccagaacctgcaaaaatcctgcttgaagatggtgaagcagcgagcagtgctcgaaagccagctgaacgagaacaagtgcgtcctggacgagctgaatcttctgggccccgacaacaaggtctacaagctcttcgggcccgttctggtcaaacaggagctggaggagtcgcgccagaatgtcggaaagcgcatcgagtacatctccaaggagctgaagagctccaccgacgcactggagaacatggagaaggacatgctgaagcatcgggaatccgtggccaagtaccaacagcagtgtcaggtggcggcggccatgcagtaa

SEQ ID NO: 331 - protein, 125 aa, Drosophila melanogaster
MDKKSAALYKKMQAEIESYQNLQKSCLKMVKQRAVLESQLNENKCVLDELNLLGPDNKVYKLFGPVLVKQELEESRQNVGKRIEYISKELKSSTDALENMEKDMLKHRESVAKYQQQCQVAAAMQ

SEQ ID NO: 332 - DNA, 2013 bp, Drosophila melanogaster
  CDS (1)..(2013): CT23882
atggataacgaggcgttagatccaacaataaaaagcagtacgtcggcagcgacgccaacagcagcagcatcagaaacgacaacaacagcagcatcttcagttgtggaaaccacaacaacaatcgcggcggccacagcctcagcggcagaatcaaaaaacgaaacaacggccacaaacaacaatagcaacacaagcggcagcatcagcagtagtagcagcaacaatatagtcataccggcatcggccactaacggtatcaaagagagtaacagtaacttaagtacaacaacaacagcagcagcagtagcggcagcaacaactgtagaaggagtagctccagcaataacgtccacaatcgtggtgaccggcggcactcctccattgagcagtttggctaacaaactcaaggacaacacaccaccgtacgatgcaccgccgcccacgccgatcagcaaggtcctgaacatcaccggcaccccgatcgttcgcaaggagaagcgccagaccagcgcccggtacaatgcctccaagaactgcgaactgacggccctcattccgctaaacgagaagaccgccgccagtgaacgtgaggagctgttcatacagaagatccagcaatgctgcacactgttcgacttctccgagccgctcagcgacctcaagttcaaggaggtgaagcgggcggctctgcacgaaatggtcgatttcctcaccaaccaaaatggcgtaataaccgaagttatttacccggaggcgatcaatatgtttgctgtcaaccttttccgaactctgccgccatcttccaacccgaatggtgccgaattcgatccggaggaggatgagcccacgttggagtcctcgtggccgcatctgcaactcgtttacgagctgttcttgcgcttcttggagtcaccagattttcaaccaagcatggcaaaacgttttatcgaccatcaatttgtattacaactattggatttattcgattcggaggatccacgtgaacgtgatttcctgaagactgttttacatcgcatctatggaaaatttttgggcttgagagcatttattagaaagcagatcaacaatgtcttttacagatttatttatgaaacggagcatcataatggcatagccgaattgttggaaatcctgggtagcattatcaatggctttgctctgccgcttaaggaggagcataaacaatttttacttaaggtattgctgccattgcacaaagccaagagcctctcggtctaccatccgcagctcacctattgtgtggtgcagttcctggagaaggatcctagcttatcggaggcggtcatcaaaagcctacttaaattttggcccaagacgcacagtcccaaggaggttatgtttttgaacgagctggaggagctgttggacgtaattgagccggccgagttccagaaggtgatggtgccgctgttccgccaaatagccaagtgcgtctcttcgcctcatttccaggtggccgaacgtgcgttgtactattggaacaacgagtacattatgtcgctgataacggataactcggcggtgatattacccattatgttcccagcgctcaatcgcaactcaaagacgcactggaacaagaacatccatggtctgatctacaatgcactcaagctgttcatggagatagatcagcggctttttgacgagtgcagcaagaactacaagcaagagaagcagatggagcgtgagaagctgtcgcaaagggaggagctctggcaacaggtggagagcttggccaagaccaacccggagtggacaaaggcgcgccggtttaacgactgcctgccggtcagcgacagccgggccctgtgcgatcaatatagtgagaacagcgattcagcgtatgatcagagcgagcagagggcgcgccagccgccgcctccgctgccgccccagaaacaggcgcaccaggagccccgagaggtgagacaggcacttgccacattaacaacactaaacaactactaa

SEQ ID NO: 333 - protein, 670 aa, Drosophila melanogaster
MDNEALDPTIKSSTSAATPTAAASETTTTAASSVVETTTTIAAATASAAESKNETTATNNNSNTSGSISSSSSNNIVIPASATNGIKESNSNLSTTTTAAAVAAATTVEGVAPAITSTIVVTGGTPPLSSLANKLKDNTPPYDAPPPTPISKVLNITGTPIVRKEKRQTSARYNASKNCELTALIPLNEKTAASEREELFIQKIQQCCTLFDFSEPLSDLKFKEVKRAALHEMVDFLTNQNGVITEVIYPEAINMFAVNLFRTLPPSSNPNGAEFDPEEDEPTLESSWPHLQLVYELFLRFLESPDFQPSMAKRFIDHQFVLQLLDLFDSEDPRERDFLKTVLHRIYGKFLGLRAFIRKQINNVFYRFIYETEHHNGIAELLEILGSIINGFALPLKEEHKQFLLKVLLPLHKAKSLSVYHPQLTYCVVQFLEKDPSLSEAVIKSLLKFWPKTHSPKEVMFLNELEELLDVIEPAEFQKVMVPLFRQIAKCVSSPHFQVAERALYYWNNEYIMSLITDNSAVILPIMFPALNRNSKTHWNKNIHGLIYNALKLFMEIDQRLFDECSKNYKQEKQMEREKLSQREELWQQVESLAKTNPEWTKARRFNDCLPVSDSRALCDQYSENSDSAYDQSEQRARQPPPPLPPQKQAHQEPREVRQALATLTTLNNY

SEQ ID NO: 334 - DNA, 3330 bp, Drosophila melanogaster
  CDS (1)..(3330): CT41698
atgaaccagcaggcgggctcctcaagggcgccagccaccgggggccaaatctcaccgccaggtgccacaacagtcggcgtggagcagcagcaacacttgcaacagcagcaccagcaacagtactacaaccagcagcaacagcagcagcagcaacagtaccagcagcagcatcagcgcgacaacttcctagcctaccagcaacagcagcaacagcagcagcagcaacagcagcagctccagcgatcgggaggcggcggtggtaactttatgctgggcaatgaccttgtcggcggcgacagcctgcgcagcctgaacaacaccttcggtcccaactcagagttcacgtcgctcggcggcgccaacagttcggcatcctcctcgctgagcggattgagcagttcgagcagtcaaggatacacgggcatggttgctgccagccagcaacaccagcagcaacagccacatcaccaccaacagcagcagcagcagcagcagcagcagcacatgggcagcatggatgccatgggcggttacagtcagatgggtggcggcatgcaccctggacccaacagcggcatgatgggcaacatgaatggccagtacatgaacggcggctccggccagggtggctacaatggagcccagggcatgggcatgggctatggcggaggtggcagcatgggaccccagaggcatcatcaaatgacgcccatgaaccagatgcagaatatgtcgatgggcccgggagtcggaggaagtggcggcatgggcggcggcatgaatcccctccagcaacaggcggcgcagcagcaaatgggcggcatgaatccgatggccaagatgcagggcatggccaatggtggatatccgcagcaggcgccacccagtctcacccagcaacagcagcaacagcagcagcgacgaatggccccatatccccacccccagatgcacatggcccagaagcgggcggcggccggtgtggggggagcgggcggaatgtacccgggtaatcccatgcagcagcagcaggcgcagatgtacggaaatcagcagatgcatccgggttccggcggaggcgttccactgcccatgcaggcgggtggagcaggaaatggttacggacgcagtggacccatgggcgtcggcaatggaggctacggccgtatgtcggcgggcaatggcatgggcccgaccggaggaccagtgatgggacctatgggtcccggtggcatgaccgccgggggaatgggtcccggaccaggctgcatgagccagcagcgcttcatgccccaaggatccggtggcggcatgcccggagtgggctatggtggagtcggaggagccgcttcccatcagggtcagttctatccgggcagtggccaaagtgctggaatgcagcaggcaggtggcatgtgcccggcgggtccgggcgccgtcgccaccaccggcaatccctaccagaatcaaggtttccagcaaaactatcagcacagtccagttcctggcaatcccacgccaccgctgacgcccgcctgcagtgtgccctatgttagccccaatccggatatcaagccacctatggacaacagcgaagaaatgagactgacattcccggtgcgcgacggcatcatcctggctcctttccgcctgctgcacaacctgtcggtcagcaaccatgtattccatctcaagcagaatgtctacaacaccctgatgtgcagaaacgatttggagctgcagctgaagtgcttccaccaggacgaccggcagatgaacaccaattggccgcataccgtcaccgtctccgcgaatgccacgcccctgaacatcgagcggtccgagaagaacagcaccgccctacgaccgctctacttgaaggcggtgtgccaaccgggaaggaatacgcttcagctgaccgccagttcctgctgttgttcgcacctgttcgtgctgcagctagtccatcgaccatcggtgcgccaggtgctgcagacgctgcacaagcgcaatctgctgccactggagcacagtgtgcagaagatcaagcgcaatctgagccagccggaggcgaatgccgggccagatgccacgccccagcagcagcagcagcagggcggcgggcagcagtgcgccaagatctcattgaagtgccccatcaccaagtcccggatacgactaccagcgcggggacacgagtgcaagcatgtgcagtgcttcgatttggaggcgtatctgatgatcaacagcgagcgtggatcgtggcgatgcccggagtgcagcaagtcggcgatcaccgataccctggagatcgatcagtacatctgggccatactcaacacgctgggcaactcggatgtggacgaggtgatcatcgattcatcggccaattggcgggcgctgcagcacaatggcggcatgccaaatgcaccgcccccctcgaatgttcctagcaatcccagtggcggcagcggctccaattccggcaacggaagtgtcaaccccaccctgccggtcatcaaacaggaactgtgcgacgacatcgccaaggtcatgtcgccgggatccacccaattgcccacttgggacagtgcgcaggccatgagtccctacaatatgcacgacatgaactccattgccagcggcaacatgatgggcaatggcggcaacaccaaccagcatggcaatcgcagcagctacgacggcttcagtggcaaccacagcgatggaagtggcggattacctggcggcgatggaggtgtcaactccctcgaccagctgaacgccatggagaagtcactcagcgatcagatgccccacaccccgcacactcctggagcggccagtcatccgatgacacctggcggaccgcccagtgtcagcagctcccacaacgaaccgatcagcggcggtacgcccaatgccaacggaagcggaagtgccaccaacggaagcggcaacaacaacagcagcacgggccacaactcgccccaaacgccgggcacgcccagtcggatgggcggcggcatgggcggatcaggctcagcggatagccaacagcagcagcaggagcagctcctcaactccctgatgagcagtcagacccagctgaagttcagcgaaagcgatctgagtgccgagctgcagagcttcgatgcggcggcagcggccataaacgatacagcccacgatctgaatctgctgcaagatgtggatcccatggagattctgtcctatctggatcctcagcccgatcttaacacgccgccctcgagtggcagcagcaacaacaacgccagcgacgacttgctggccacgttattcgactaa

SEQ ID NO: 335 - protein, 1109 aa, Drosophila melanogaster
MNQQAGSSRAPATGGQISPPGATTVGVEQQQHLQQQHQQQYYNQQQQQQQQQYQQQHQRDNFLAYQQQQQQQQQQQQQLQRSGGGGGNFMLGNDLVGGDSLRSLNNTFGPNSEFTSLGGANSSASSSLSGLSSSSSQGYTGMVAASQQHQQQQPHHHQQQQQQQQQQHMGSMDAMGGYSQMGGGMHPGPNSGMMGNMNGQYMNGGSGQGGYNGAQGMGMGYGGGGSMGPQRHHQMTPMNQMQNMSMGPGVGGSGGMGGGMNPLQQQAAQQQMGGMNPMAKMQGMANGGYPQQAPPSLTQQQQQQQQRRMAPYPHPQMHMAQKRAAAGVGGAGGMYPGNPMQQQQAQMYGNQQMHPGSGGGVPLPMQAGGAGNGYGRSGPMGVGNGGYGRMSAGNGMGPTGGPVMGPMGPGGMTAGGMGPGPGCMSQQRFMPQGSGGGMPGVGYGGVGGAASHQGQFYPGSGQSAGMQQAGGMCPAGPGAVATTGNPYQNQGFQQNYQHSPVPGNPTPPLTPACSVPYVSPNPDIKPPMDNSEEMRLTFPVRDGIILAPFRLLHNLSVSNHVFHLKQNVYNTLMCRNDLELQLKCFHQDDRQMNTNWPHTVTVSANATPLNIERSEKNSTALRPLYLKAVCQPGRNTLQLTASSCCCSHLFVLQLVHRPSVRQVLQTLHKRNLLPLEHSVQKIKRNLSQPEANAGPDATPQQQQQQGGGQQCAKISLKCPITKSRIRLPARGHECKHVQCFDLEAYLMINSERGSWRCPECSKSAITDTLEIDQYIWAILNTLGNSDVDEVIIDSSANWRALQHNGGMPNAPPPSNVPSNPSGGSGSNSGNGSVNPTLPVIKQELCDDIAKVMSPGSTQLPTWDSAQAMSPYNMHDMNSIASGNMMGNGGNTNQHGNRSSYDGFSGNHSDGSGGLPGGDGGVNSLDQLNAMEKSLSDQMPHTPHTPGAASHPMTPGGPPSVSSSHNEPISGGTPNANGSGSATNGSGNNNSSTGHNSPQTPGTPSRMGGGMGGSGSADSQQQQQEQLLNSLMSSQTQLKFSESDLSAELQSFDAAAAAINDTAHDLNLLQDVDPMEILSYLDPQPDLNTPPSSGSSNNNASDDLLATLFD

SEQ ID NO: 336 - DNA, 1833 bp, Drosophila melanogaster
  CDS (1)..(1833): CT23982
atgaaccagcaggcgggctcctcaagggcgccagccaccgggggccaaatctcaccgccaggtgccacaacagtcggcgtggagcagcagcaacacttgcaacagcagcaccagcaacagtactacaaccagcagcaacagcagcagcagcaacagtaccagcagcagcatcagcgcgacaacttcctagcctaccagcaacagcagcaacagcagcagcagcaacagcagcagctccagcgatcgggaggcggcggtggtaactttatgctgggcaatgaccttgtcggcggcgacagcctgcgcagcctgaacaacaccttcggtcccaactcagagttcacgtcgctcggcggcgccaacagttcggcatcctcctcgctgagcggattgagcagttcgagcagtcaaggatacacgggcatggttgctgccagccagcaacaccagcagcaacagccacatcaccaccaacagcagcagcagcagcagcagcagcagcacatgggcagcatggatgccatgggcggttacagtcagatgggtggcggcatgcaccctggacccaacagcggcatgatgggcaacatgaatggccagtacatgaacggcggctccggccagggtggctacaatggagcccagggcatgggcatgggctatggcggaggtggcagcatgggaccccagaggcatcatcaaatgacgcccatgaaccagatgcagaatatgtcgatgggcccgggagtcggaggaagtggcggcatgggcggcggcatgaatcccctccagcaacaggcggcgcagcagcaaatgggcggcatgaatccgatggccaagatgcagggcatggccaatggtggatatccgcagcaggcgccacccagtctcacccagcaacagcagcaacagcagcagcgacgaatggccccatatccccacccccagatgcacatggcccagaagcgggcggcggccggtgtggggggagcgggcggaatgtacccgggtaatcccatgcagcagcagcaggcgcagatgtacggaaatcagcagatgcatccgggttccggcggaggcgttccactgcccatgcaggcgggtggagcaggaaatggttacggacgcagtggacccatgggcgtcggcaatggaggctacggccgtatgtcggcgggcaatggcatgggcccgaccggaggaccagtgatgggacctatgggtcccggtggcatgaccgccgggggaatgggtcccggaccaggctgcatgagccagcagcgcttcatgccccaaggatccggtggcggcatgcccggagtgggctatggtggagtcggaggagccgcttcccatcagggtcagttctatccgggcagtggccaaagtgctggaatgcagcaggcaggtggcatgtgcccggcgggtccgggcgccgtcgccaccaccggcaatccctaccagaatcaaggtttccagcaaaactatcagcacagtccagttcctggcaatcccacgccaccgctgacgcccgcctgcagtgtgccctatgttagccccaatccggatatcaagccacctatggacaacaatgccccacaccccgcacactcctggagcggccagtcatccgatgacacctggcggaccgcccagtgtcagcagctcccacaacgaaccgatcagcggcggtacgcccaatgccaacggaagcggaagtgccaccaacggaagcggcaacaacaacagcagcacgggccacaactcgccccaaacgccgggcacgcccagtcggatgggcggcggcatgggcggatcaggctcagcggataa

SEQ ID NO: 337 - protein, 610 aa, Drosophila melanogaster
MNQQAGSSRAPATGGQISPPGATTVGVEQQQHLQQQHQQQYYNQQQQQQQQQYQQQHQRDNFLAYQQQQQQQQQQQQQLQRSGGGGGNFMLGNDLVGGDSLRSLNNTFGPNSEFTSLGGANSSASSSLSGLSSSSSQGYTGMVAASQQHQQQQPHHHQQQQQQQQQQHMGSMDAMGGYSQMGGGMHPGPNSGMMGNMNGQYMNGGSGQGGYNGAQGMGMGYGGGGSMGPQRHHQMTPMNQMQNMSMGPGVGGSGGMGGGMNPLQQQAAQQQMGGMNPMAKMQGMANGGYPQQAPPSLTQQQQQQQQRRMAPYPHPQMHMAQKRAAAGVGGAGGMYPGNPMQQQQAQMYGNQQMHPGSGGGVPLPMQAGGAGNGYGRSGPMGVGNGGYGRMSAGNGMGPTGGPVMGPMGPGGMTAGGMGPGPGCMSQQRFMPQGSGGGMPGVGYGGVGGAASHQGQFYPGSGQSAGMQQAGGMCPAGPGAVATTGNPYQNQGFQQNYQHSPVPGNPTPPLTPACSVPYVSPNPDIKPPMDNNAPHPAHSWSGQSSDDTWRTAQCQQLPQRTDQRRYAQCQRKRKCHQRKRQQQQQHGPQLAPNAGHAQSDGRRHGRIRLSG

SEQ ID NO: 338 - DNA, 2751 bp, Drosophila melanogaster
  CDS (1)..(2751): CT23998
atggccaaaatggaggtcgacgatgtggtcgacttgagtttggggtccggtcgtgacccggcgttgaccataacgccggctccgccgccggcggcgctcagtaatcgggatctgcgtgcgctgacagccaacaatgctggcctgaccatcactccgtcagcatcgccggcgaccaataatggcaccacctccaatagcagtaacacaaactccaacagcagcagcaccaccaccaccaccaacaacaacaacaacagtagcagtaacaccaatagctccagcgcaaacaacaataacaacaacaacagcattaacgccagtgatggtgtcacaggtgcgacaagtggatccataggcggcggtcaggatgagaacaaggttcagcggagagtactgcgaccacgaaccgaacccaaatcctatgccgaggccccagacattgtgttactacccgctcgcacaaatggccgtcagcagaatggaaacatcgattcggagacggatgacgaggagatgcccccgtatgtgcccatcaaggagctgagccatgcagagctcaaggagcgcgagaagagtctgaggaagctgcggcaggatctgcgcaatgaggagaccaaactgatgctgctcaagaaactcaagcagtcgcagcaggtgatgaaggagaatctggtggtgacgccgaccagcgtatcgcccaacaatccgctatcggcgatacccgccgctctcacctcgaagggatcgctgagtgtgacgcccacgtcggcggtacccctgcccgcccacagcaagggcagcaggagcagtttgagcggcagcggcggaccggcagtgagcataagcgccaccaacagtcgaacgggcagctcgagttcagcggcggcggctgcttcggcaattgcagcggccgccatgagcggccaacatcgcagcggtagcaactccatactgccgccgccacgatcatcgctgcccgctggtgccaccttggccgccggcactaccatcacgcccgccacctcctcatcgcaccgctcgagcaatttgccgccgcgcaccaacctgccgaatctcaccatcacgccatcggtgaccatcacgcccacatcggcaccgccctccagtctgaaaccacgcaatgtacctgggaccataagcaattctgtttccatcacgccggcgctaccactgtcccaatcgcatcagaatcagcacaacgatcagaagaatgatcgctccacgccaagagaagatgcccagacaccagctcaaagacaggcggcggctaaaatggcgctacgcaagcagctggaaaagacgctgcttcagattccgccaccaaagccaccaccgccagagatgcacttcattcccaatcccagcaacacggattttgtgtatcttcttggtttggaaaccgttgtggattatctgaccgtcaacaagaaggccaatgctgtggcagcaccattccgttgtgcccagtgcaagattgattttacacccgtgtggaagtgggagaaacagaccaacaaagatcccaaagtgatttgcgagcagtgcgtcacctcgaatgtgaagaaggcactcaaggcggagcacaccaaccgactgaaacaggcattcgttaaggcgctgcagcaggagcaggagatcgaacagcgtttggccagccagagcagtccatcgccggtggacaaccatggatcgagtggcggcggcaattcgctgtctgtctccgcggtgtctagcaattcctcatcgtcgcatatgcagcgggaacgggaacagctgcaggcgtcgcatgcatcggcggctgctgcacttgtcaatctgccgccgtcggtgacagtgatacccaccaaatgccagacgccgacgccagcgacaccgcgtccaacgccaccgccaccacaaagtcaagccacaccaccgccgtcatctggaggatcgcgatcctcgcgagcggcggccaccgccgctgcagcagctattgccgctcagcaggcgggtatccttagtcctgggccgtcgccagcgcatcaccatgagccgactacatcctcgagatcctcccgcaacgatcgactcgatcatcaccatcagtcgcagcagcaacagcagcgcgatcagcgggaaagagatcagcagcagcgggatcagcagtcgcaacagcaggcccaaaactacgacaaatactcggcggccaccctggcggcggctgctcatctgagtgctcttggcggcatgggcggattgaatatcaatagcttggccagtctaggcaaccttggcaatttgggcaacctcagccagctgggcaatctggctgcgctgggaggattgggtaattttggcggagcatcgacgggttcggctaatccggcggcaggactgagcggttcctcgccagctgctacggcggcagccatgcaggcgttccagcagcagctctttagagctttgggacaaggacttggtggcaatccgcagcatatgatgcagttcgcaccgcttttgtactcttaccaaatggccatggcgcaggcggcacaagtggcagccttcaacaataacaacaagaagagcagctcgtcctccggatcggcgaagaattccagcagctcgaacagcatggcggaagttcagcgggcggcggagctgcagcgccaatatctactggagatgataccgccccagcagcaaagtggggccagtggcagtcggcagaacaactggaaggcctaa

SEQ ID NO: 339 - protein, 916 aa, Drosophila melanogaster
MAKMEVDDVVDLSLGSGRDPALTITPAPPPAALSNRDLRALTANNAGLTITPSASPATNNGTTSNSSNTNSNSSSTTTTTNNNNNSSSNTNSSSANNNNNNNSINASDGVTGATSGSIGGGQDENKVQRRVLRPRTEPKSYAEAPDIVLLPARTNGRQQNGNIDSETDDEEMPPYVPIKELSHAELKEREKSLRKLRQDLRNEETKLMLLKKLKQSQQVMKENLVVTPTSVSPNNPLSAIPAALTSKGSLSVTPTSAVPLPAHSKGSRSSLSGSGGPAVSISATNSRTGSSSSAAAAASAIAAAAMSGQHRSGSNSILPPPRSSLPAGATLAAGTTITPATSSSHRSSNLPPRTNLPNLTITPSVTITPTSAPPSSLKPRNVPGTISNSVSITPALPLSQSHQNQHNDQKNDRSTPREDAQTPAQRQAAAKMALRKQLEKTLLQIPPPKPPPPEMHFIPNPSNTDFVYLLGLETVVDYLTVNKKANAVAAPFRCAQCKIDFTPVWKWEKQTNKDPKVICEQCVTSNVKKALKAEHTNRLKQAFVKALQQEQEIEQRLASQSSPSPVDNHGSSGGGNSLSVSAVSSNSSSSHMQREREQLQASHASAAAALVNLPPSVTVIPTKCQTPTPATPRPTPPPPQSQATPPPSSGGSRSSRAAATAAAAAIAAQQAGILSPGPSPAHHHEPTTSSRSSRNDRLDHHHQSQQQQQRDQRERDQQQRDQQSQQQAQNYDKYSAATLAAAAHLSALGGMGGLNINSLASLGNLGNLGNLSQLGNLAALGGLGNFGGASTGSANPAAGLSGSSPAATAAAMQAFQQQLFRALGQGLGGNPQHMMQFAPLLYSYQMAMAQAAQVAAFNNNNKKSSSSSGSAKNSSSSNSMAEVQRAAELQRQYLLEMIPPQQQSGASGSRQNNWKA

SEQ ID NO: 340 - DNA, 888 bp, Drosophila melanogaster
  CDS (1)..(888): CT24094
atgtcggccagaagagcaacccatgcaggcagctggtacacggactcgggcgccgagctctcgagacagttggatcgttggctgggtgccgcagatttgtcccatggaccggctcgtgccatcattgctccacatgctggatatacgtactgtggagcctgcgctgcctttgcctatcgccaagttagcccagttgtcgtcaagcgaatcttcatactgggtccctcgcatcatgtgcgtctgcgtggctgcgccttatccgtggcgaagaagtacaggacacccctctatgatctcaaaattgatgctcagatcaactctgagcttgagaagactggaaagttttcttggatggacatgaagactgacgaggatgaacactccatcgagatgcatttaccctacattgccaaagtgatggaggactacaaggatcagttcaccattgtgcctattctggtgggttcgctcaatcccgaacaggaggcgcagtacggcagcctgctgtcctcgtatctgatggaccccaccaatctgtttgtgatatcttccgacttttgccactggggccatcgcttcagctatacctactatgacagctcctgcggagcgattcacaagtccatcgagaagctggacaagcagggcatggacatcattgagtcgctcaatccgcactccttcaccgagtacttgcgcaagtacaacaatacgatatgcggacgccatcccatcggagtaatgctaggcgccgtgaaggcactgcaggatcagggctacgacaagatgagtttcaagttcctcaagtacgcccagagcagccagtgtcaggacattgaggactccagcgttagctacgcctccggatcgctcgtcttcgagatgtaa

SEQ ID NO: 341 - protein, 295 aa, Drosophila melanogaster
MSARRATHAGSWYTDSGAELSRQLDRWLGAADLSHGPARAIIAPHAGYTYCGACAAFAYRQVSPVVVKRIFILGPSHHVRLRGCALSVAKKYRTPLYDLKIDAQINSELEKTGKFSWMDMKTDEDEHSIEMHLPYIAKVMEDYKDQFTIVPILVGSLNPEQEAQYGSLLSSYLMDPTNLFVISSDFCHWGHRFSYTYYDSSCGAIHKSIEKLDKQGMDIIESLNPHSFTEYLRKYNNTICGRHPIGVMLGAVKALQDQGYDKMSFKFLKYAQSSQCQDIEDSSVSYASGSLVFEM

SEQ ID NO: 342 - DNA, 3180 bp, Drosophila melanogaster
  CDS (1)..(3180): CT24122
atgaccaattcgattgcgtcaacgaaatgcctgcccaatgcactatcgaccggcaattatggaatgtcccagagccaccgttacaccgatgatagcaaggagtacatcatcgtcaagcttaccgattctgccttccgtgcgatcgaggaatatcagcgcgatgacaacgctaaacgcctgcaaccaggccaaagggccaaaatccaatttgtgggcaacacgggtgtcatacagttcccgcgaccagcgacggatgctaatggcatccctaatgctaatggcaatggcagcgacgcgactggagcaggaggaggaggtggtagaaaatttggcttcactatcaacaatatggagggaacgcttgaatgcgttcagcagcagcaacggagcctcggagtcctcggagcggtcaccctgcgaatgcggattcatgccaatgaagatgtctacgattcgacacgcacaaaaatggccattgccgaggagacggagaagagcaagtgcatcagggaaatcaagccgaatcagtcggatatcgggcgtaaggtgaagaagccgccatcagcaatccaatcttctgcctcaaccgcctcagccttctcctccaactcctctaactccggtttgacgacgacggcatttcatcatcacagcaacagcaacaacagtgggaacaacaacaacaggagcagcagcagcagcaatagttttaatagcaacaaccatagtcgtaagttaggttcatcgccatttaatggcctaggcgtaggatccagcagctcctccagcgcgtttgcctcgcgctcgcccaatcccagcacgctgggcgctatcggcacagtcaatggctctggcgttgttggtggtcgctatggtggcggtgcagcctcctcgctagcttccacattcgccaacggcatctcacagggctaccacaacctgagcggcagctcgccaagagactcgatgacagcgggaacatcaagtgcgactgcctcatcagtcatctcctcacgcaacaagatgccaagcggaggccttacctcctccaactccaactcctcatcgtcctccaggagtgccaatagcaagtcttcgggcggcaacaagatgtccgatgtgtccaggcgcaatatacgcgaacggcttatccatctgctggccctcaaggccttcaagaagcctgagctctttgcgcgcctgaagaacgaaggcattcgggatcgggagcgtaaccagatcaccaacatactcatggacattagcaccatgtcgcacaacacgtacaatctgcgtcgccagatgtggaacgatgtggacgagaactggccctttttcagcgaacaggaggttcagcagctgaagcgacgcaagcctcaaaatctgacaccgccaatgagttcggacgcgggcagttcgacgtccggccagagtccaacatcgacgcacacgggcagtccgccgccgccttcaagtaatggtggtcccggtggagttggaagtggagcaggcggtacgagcatgaagcggaccagcctcgagtacgacgagaccatgttcagcactgttcagcccaagaagcagcgcatcagtcactacaagaaggacactccgccctcgggaacgtcgtactcttccgctggggtatcgatgtcactgggttcatctggatcatccagtcggagtcggtatacgccgccgcaacgccagcctggtccattggatgatcacagcacaactgaccttagctacaatgtgctggacaacatagtagagtttatgagctccacggcagcggcgacgcagcaatcgatggaacagcagcagcatccgagaagcaacagtagtaataacagacgtggaagctcctcgttggcgggcaccagcaatgggggcaacaacaaggataagcggaactctacgggcagcaattcaagcagctccagtggctatgagacgcaacaggatcgccagcgttcaacaacgccgatgtcgtcaaaccgcagcagcgcatcctcttcaacgacgccgccgaagcttgcggccagttttgtgcccgcggccacctctggatccgcttccggtaccagcaaacaacgtatgccgccccagcaaagcgactacaactcgtacaacagcaataacgctcaacatgtggcgtccaacagcaaaaaaaggatgggtagtgttggtcctagtggtggatcgaatggccagcgtcaaagaagtgccagtggctctaattctggctatcaacaggtgccgccaccctcgtccaactcgcggtcgtctatccagcagcagaatcagcaccagaagcagcaggtgcaacagaagcaggcgccgtcgcagcagcagcagcagcagcaacagcaataccatcagcaagccaagcatccatcgccatcgcagcagttggctgctgctgcccatgcctatgcccatgccaccgcggatacggactcatccgccacgccgcgctacgacttcagccaatacgtgcccatccagaccctggaggtgcggcgccgttacaagactgagttcgaaagcgactacgatgagtaccgcaagctgctgacgcgcgtcgaggatgtgcgcaatcgtttccaggacttatccgaacgtctggagagcgccaggcgctgtgacaacggatacggggactacgatcacatcaagcggcagattgtgtgcgaatacgagcggatcaataacgatcgcaccattggagaggacaaggagcgttttgattacctgcacgccaagctggcgcacatcaagcagctggtgatggactatgacaagactttgatgagtgccacgatggcgatggcgcccacggacgtcgttgctgctcaagggcccgatccagctgtggctaaggcggcggccaggttagccgaacatcatcgtcggcaacatcacgccgcagagacgataaaacaacagcagcagcaaaagcagacacatcagcatcatttgcagcgtcatttgcagcatcatttgcagcagcaacaaaatctactgcagcagcaacaaaatctactgcagcagcagagtgtgagtaattcggatgacagttcggatagctcggattccaatgatgacgacgacgacgacgatgaggactgcgatgattccaactctaataccgatgacgatgaggcacgctactaa

SEQ ID NO: 343 - protein, 1059 aa, Drosophila melanogaster
MTNSIASTKCLPNALSTGNYGMSQSHRYTDDSKEYIIVKLTDSAFRAIEEYQRDDNAKRLQPGQRAKIQFVGNTGVIQFPRPATDANGIPNANGNGSDATGAGGGGGRKFGFTINNMEGTLECVQQQQRSLGVLGAVTLRMRIHANEDVYDSTRTKMAIAEETEKSKCIREIKPNQSDIGRKVKKPPSAIQSSASTASAFSSNSSNSGLTTTAFHHHSNSNNSGNNNNRSSSSSNSFNSNNHSRKLGSSPFNGLGVGSSSSSSAFASRSPNPSTLGAIGTVNGSGVVGGRYGGGAASSLASTFANGISQGYHNLSGSSPRDSMTAGTSSATASSVISSRNKMPSGGLTSSNSNSSSSSRSANSKSSGGNKMSDVSRRNIRERLIHLLALKAFKKPELFARLKNEGIRDRERNQITNILMDISTMSHNTYNLRRQMWNDVDENWPFFSEQEVQQLKRRKPQNLTPPMSSDAGSSTSGQSPTSTHTGSPPPPSSNGGPGGVGSGAGGTSMKRTSLEYDETMFSTVQPKKQRISHYKKDTPPSGTSYSSAGVSMSLGSSGSSSRSRYTPPQRQPGPLDDHSTTDLSYNVLDNIVEFMSSTAAATQQSMEQQQHPRSNSSNNRRGSSSLAGTSNGGNNKDKRNSTGSNSSSSSGYETQQDRQRSTTPMSSNRSSASSSTTPPKLAASFVPAATSGSASGTSKQRMPPQQSDYNSYNSNNAQHVASNSKKRMGSVGPSGGSNGQRQRSASGSNSGYQQVPPPSSNSRSSIQQQNQHQKQQVQQKQAPSQQQQQQQQQYHQQAKHPSPSQQLAAAAHAYAHATADTDSSATPRYDFSQYVPIQTLEVRRRYKTEFESDYDEYRKLLTRVEDVRNRFQDLSERLESARRCDNGYGDYDHIKRQIVCEYERINNDRTIGEDKERFDYLHAKLAHIKQLVMDYDKTLMSATMAMAPTDVVAAQGPDPAVAKAAARLAEHHRRQHHAAETIKQQQQQKQTHQHHLQRHLQHHLQQQQNLLQQQQNLLQQQSVSNSDDSSDSSDSNDDDDDDDEDCDDSNSNTDDDEARY

SEQ ID NO: 344 - DNA, 4155 bp, Drosophila melanogaster
  CDS (1)..(4155): CT24346
atgtctattctgctggcggacattgatgccacgtgtgcggccttgggatacagtgatggacagaaatatcaagcggagcctgatgccgccgagggtctcaagcatctgatatggattctgcgtcgggacctggacaaccacgagtatcgccgtcatttgggccgctccaaggtgctccaaacggacttggtttacatgctgccggactatgtgcatcacgaggagctatccgatctactgatccgcctgctggtcatcctgaccaatccgacactgctgctctaccgggagggtgctcccaaggacaaccatggccggaaagtgttcatggagctaatcgacatcctgcagggctacaaagcagcctttgccaaggacaaagtctggagcgcccttttcgagaagctcaagcaggctttggaaatagcatttgcgattcgcagcgaagagcagaatcttctgattgagcgcatcctggtcctggtgcggaacgttctgcaagtgccagcgaatccggaggccgagtgccgggcggacaatgatgccagtctgcacgaccaggtcatttgggcgttgcatcaaactggaatgctggacttggtgctgtttgtcatctcctcgccggatgaggagcagttccatttgcacggactggagattgtttgcctgcttttcagggaacagagtgccgaatccctggcggacgcctccctgcagcgcagtctgagcgaaaagcagcgggaccagcaggagctcctggccgcacgacgacgggagcgtgcccgccgtcaggctcgtcctccaccagggcggcattcccgtttcggcggaacctatgtcattcggaacatgaagtccgtttcggatcgggatgtgatatgccaccaggctctggagcgcgtgtcatcgatcgattttgaccgcgagaagcagcagcagaagcgctcccaccgacacatccaggaggaggcgcaggtgacccgtcgcagtgcgttcaccgttagattgtgcctgcgcgaatactgcatcgaggtactgcgctccgcttacaacactctggtgaggcaggtgcgtcgggtgctggaacgcaacgccggatcgtcgagtcacgatgactcctatctattgtgggccatacgatttttcatggagttcaatcgtttgagtggtctacaattgcagttagtcagcgaatcgttgagcgtgcaatgcttccactgggtcctgacgcgcatgcaacatgacatggacatgattgtgagcgacaagaaacaggcgcgtctctgggccaagcgactgcatgtagcgcttttgacattccgggaattgctccaaagcctgctggcactgcagaagctaaaggatgacaacaacgcgcgagcccttttcgatatgttattgaacaacgtgtgctatgtcctggagtatcgggagacggtgctgcatttgttaatgaactacaatgaggcgcacagcacaaaggtttttctgcgcgatgtggtggaaacggccaacgttttcattaaaatgatggagcgcttctgccaggactctgtggtggtgcaagacaagaagcgaggtggtggcgcctcccgaaagaagaagcaggcggcgaccaagtccaagccaccagctgcaccacagcccactgaggaagaattgtcgagcaaatgggctgaactggcaacggaagtgtgcagcctgctgtccacggaattggaaatgccagaggatgagcagcccctgcccttcgatgccgcatccgagaaatccattgatgatcagcgcgaggattgcatgattcgcataaataaactgcttcgttccgagaaactggaccaggccatcgcccttcttcgtgctgccagggaagtttggccggagaacgaagtgttcggtgcaatttccgctgcaccggaagacgagctgctgctcctgcgtgagattttcatgtccaacattacaacagttgagtccgaggataaggaaaacgaaaaggaccaaaagcaggacgagtacgaggacgaagacgacgacttggataacgaagaatacgaagagcaggataatggactcaccgagaaaacgttcaaatttgatgatttcgctcgcagattgctgaatccgaaaatcgttcgggcttgcacattagtgctatcggattgggcggatatacccactcgatctttgaaagcggccgtaactattctacatcgcattgcctacggctgcaaatgtgcgggaatgctttttcaggccaagctgtttcgcatctttcaacaagtcttcagcgtggaacgtgacgtccatcaggaggagctgcgccgcctggccatctttgtggtgcgcaaatttgtcgaggtagccccgactaatcccaaaatctatgcagagttattattttacaaaggcatcagggaggcaaatgagctggagtcgggctattgtgacgcctacgaagctggcaccaaaggagcctggaccgaggagcaggagtcggagctacgcttcctcttcgaggagaaccagcgcaatcctgaaacagataaggatgtgattgattggattctggacaatttggtcgacaagacgcgcaaccgccgcaccgtcctgaagaagctgaaggaactgggcctgctattcaaggcgcccaccaagcgttcgaccaagtccgcccagagcggcaaaaacgtctggcagccggaagaggatgacgagctaaggagcttatatgatcagcatcgcattgagccggactgcctagagcggcttgtcaatgagttcgctgaacgacgtagcaaacagcagatcatcaagcgaatgcttcagattcatttgatagcggataaatccgagattctgcccgccaaaaaggggcgtggcaaagacaagcccaagaaagacgtagaaatggaaggcgagggcgatgagtttgattttgccgaggagcccatgtttgaggaccaggggtataagaagccgaagtccaaaccgaaaaaagtccagaagcgtcagatggtacgcacacccttggatgtaggcaccattagagctctaatcggtcaggtggattccgaaaagtatcaatcggccatcgagtggctgcaggaatgcctgcaagacgctagcgaagataccgaggaagcagtcgaggatgacgatggtgtgcctctcctgcctctaatggagaatcaaaagaatgccatggaagatggtgatttccaaaaggtcctggtcgccctgggcatgcagccaccaatttcgggaatggaagcctactggcgtattcctatatatctgaactcagccgatttgatattacgttccaaaatcctggcaggagaagaggttgatgctgagccggaagacgaggctgcagacgatgaggatggcgaggaagccgaggagagtgacgaagaggaggacttccttgaaaagcacagcaggcagcggaaggagaacatagccacccaacagcagcgaaaacttgatagtcttatgttcaaccagagcgatgacgaaaccgagcagcgtgctcccccaaaagccaaggacaaacccaaggccagcgaaaagaaggccaagcgaaaggtcaaaggcaaagccaaggagtcaaaggactgcaatgacgatgggacagataaagcagagctcgagaaacccaacacggatgatttatttaaccaattgagagccaagcgagccactaaaatcaaactgagcgatatggctctaaatgagtcaacaaatgccgctcaagaggcggacgatgatgcatttaacttcaactcggaggactatcgtgcccgcctgctggaactggaggatgaggagcagaacagcaaggatgcggatgagaacggcggtgacaaagagaacattaccaataagtccctgcagcgtgcacgtcgcgttaatgtaattgactcggatagcgacaacgacgatgatggcgccttgcccgccgacaagacaaacaaacgcccacgcagcgacgacgatggggattctggccacatggatgccaatgccgaggaggacagcgatgaggaggccaactttttggctcgcaaaaagccagccaaagtcgatggcgagccggccaagcggcgtcggttggccatcatcgatgacgatgatgaggatgatttttaa

SEQ ID NO: 345 - protein, 1384 aa, Drosophila melanogaster
MSILLADIDATCAALGYSDGQKYQAEPDAAEGLKHLIWILRRDLDNHEYRRHLGRSKVLQTDLVYMLPDYVHHEELSDLLIRLLVILTNPTLLLYREGAPKDNHGRKVFMELIDILQGYKAAFAKDKVWSALFEKLKQALEIAFAIRSEEQNLLIERILVLVRNVLQVPANPEAECRADNDASLHDQVIWALHQTGMLDLVLFVISSPDEEQFHLHGLEIVCLLFREQSAESLADASLQRSLSEKQRDQQELLAARRRERARRQARPPPGRHSRFGGTYVIRNMKSVSDRDVICHQALERVSSIDFDREKQQQKRSHRHIQEEAQVTRRSAFTVRLCLREYCIEVLRSAYNTLVRQVRRVLERNAGSSSHDDSYLLWAIRFFMEFNRLSGLQLQLVSESLSVQCFHWVLTRMQHDMDMIVSDKKQARLWAKRLHVALLTFRELLQSLLALQKLKDDNNARALFDMLLNNVCYVLEYRETVLHLLMNYNEAHSTKVFLRDVVETANVFIKMMERFCQDSVVVQDKKRGGGASRKKKQAATKSKPPAAPQPTEEELSSKWAELATEVCSLLSTELEMPEDEQPLPFDAASEKSIDDQREDCMIRINKLLRSEKLDQAIALLRAAREVWPENEVFGAISAAPEDELLLLREIFMSNITTVESEDKENEKDQKQDEYEDEDDDLDNEEYEEQDNGLTEKTFKFDDFARRLLNPKIVRACTLVLSDWADIPTRSLKAAVTILHRIAYGCKCAGMLFQAKLFRIFQQVFSVERDVHQEELRRLAIFVVRKFVEVAPTNPKIYAELLFYKGIREANELESGYCDAYEAGTKGAWTEEQESELRFLFEENQRNPETDKDVIDWILDNLVDKTRNRRTVLKKLKELGLLFKAPTKRSTKSAQSGKNVWQPEEDDELRSLYDQHRIEPDCLERLVNEFAERRSKQQIIKRMLQIHLIADKSEILPAKKGRGKDKPKKDVEMEGEGDEFDFAEEPMFEDQGYKKPKSKPKKVQKRQMVRTPLDVGTIRALIGQVDSEKYQSAIEWLQECLQDASEDTEEAVEDDDGVPLLPLMENQKNAMEDGDFQKVLVALGMQPPISGMEAYWRIPIYLNSADLILRSKILAGEEVDAEPEDEAADDEDGEEAEESDEEEDFLEKHSRQRKENIATQQQRKLDSLMFNQSDDETEQRAPPKAKDKPKASEKKAKRKVKGKAKESKDCNDDGTDKAELEKPNTDDLFNQLRAKRATKIKLSDMALNESTNAAQEADDDAFNFNSEDYRARLLELEDEEQNSKDADENGGDKENITNKSLQRARRVNVIDSDSDNDDDGALPADKTNKRPRSDDDGDSGHMDANAEEDSDEEANFLARKKPAKVDGEPAKRRRLAIIDDDDEDDF

SEQ ID NO: 346 - DNA, 732 bp, Drosophila melanogaster
  CDS (1)..(732): CT24393
atgttctcgagagccgctcttctaacagcccagcgccccttgaccgtggccgccacccggtcggcagccgctgctgccgctcctggcggagccatcgagcgccgccagcgccccgagcatcccggcaaggtccgtctgggattcctgcccgaggagtggttccagttcttctacaacaagaccggtgtcaccggaccctacaccttcggcgtgggtctgatcacctatctctgctccaaggagatctacgtcatggagcacgagtactacagcggtctgtcgctcggtatcatggccatcattgctgtcaagaagctcggcccggtcatcgccaagtgggctgatggcgagatcgataaaatcgaatctgagtggaaggagggacgcgaggctgagctgaaggtcctctccgacgccatcgaggccgagaagaaggagcagtggcgcgccgacggtgccctgctgctgatggaagccaagaaggagaacattgcattgcagctggaggccgcgttccgtgagcgcgccatgaatgtgtactcggaggtgaagcgtcgtctcgactaccaggtggagtgccgccacgtcgagcgtcgccttagccagaagcacatggtcaactggatcaccaccaatgtgttggccagcatctctccccagcaggagaaggagactctcaacaagtgcatcgccgatctgagcgctctggcactgcgcgtcaagtctgcctaa

SEQ ID NO: 347 - protein, 243 aa, Drosophila melanogaster
MFSRAALLTAQRPLTVAATRSAAAAAAPGGAIERRQRPEHPGKVRLGFLPEEWFQFFYNKTGVTGPYTFGVGLITYLCSKEIYVMEHEYYSGLSLGIMAIIAVKKLGPVIAKWADGEIDKIESEWKEGREAELKVLSDAIEAEKKEQWRADGALLLMEAKKENIALQLEAAFRERAMNVYSEVKRRLDYQVECRHVERRLSQKHMVNWITTNVLASISPQQEKETLNKCIADLSALALRVKSA

SEQ ID NO: 348 - DNA, 1602 bp, Drosophila melanogaster
  CDS (1)..(1602): CT24437
atggcttcgattagcttgctgaaccccaaggccgagtttgcccgcgccgcccaggctctggccatcaatatcagtgccgccaagggactgcaggatgtgatgcgcaccaatttgggacccaagggcaccgttaagatgttggtttctggcgccggcgacatcaagatcaccaaggatggcaatgtcctgctgcacgaaatgcagatccaacatccgactgcctctatgattgccagggccagcacggcccaggatgattccaccggcgatggaaccaccaccactgtgatgcttattggcgagctcctgaagcaggccgatatctatctgtccgagggactgcatcctcgcatcatgaccgatggattcgagaaggcacgcgacaaggcattggaggtgctcgaccaggtcaaggtgcccgtggagatcaacaagaagaacctggtggaggtggccaacacaagtctgaagaccaaggtgcatcccgcccttgccgatctgcttacggacgtctgcgtgaatgccgtgctgaccattgccagtgccgataagaccaagcccgtggacctccacatggtggagctgatggagatgcagcacaaatccgataccgatacacagctggtgcgtggactagtcatggaccatggtgctcgccacccggacatgccgaagcgtttggagaatgcctacatccttacggccaatgtctcgctggagtacgagaaggccgaggtcaactctggcttcttctacaagaccgccgaggagcgtgaggcctttgtgcgcgccgagcgcgaattcatcgaccagcgtgtgaagaaggtgatcgaattgaagcgctccgtgtgcgatggcaccgacaaaaccttcgtcctgatcaaccagaagggcatcgaccccatctcgctggacgccctggccaaggagggcatcctggccttgcgtcgcgccaagcgccgcaacatggagcgtctgtctttggcctgcggtggcactgcaatgaactcctttgacgatctgcaggaggagcacttgggatacgccggtgtggtgtacgagcatgttctgggcgagaacaagtacactttcgttgaggactgcaagaacccgctgtccgtcacgatcctgatcaagggtcccaacaagcacacgatcacccagatcaaggacgccatcagggacggtctgcgtgccatcaacaacaccattgccgataaggctctggtgcccggagctggagcattcgaggtgcgcgcgtacaacgagctggtcgccttcaaggacaccatcaagggcaagtcccgcctggcagtgcaggcctttgccgatgccctgctggtcattcccaagacgctggccgtgaacagcggctacgatgcccaggacacaatcgtcaagctgactgttgaggatcgcctgagtcccgaactggtcggcctggatctggccaccggggagcccatgaagcccgtggatctgggcgtctacgacaactacatcgttaagaagcagatcctcaactcctgttcgatcattgccagcaacctgcttctcgtcgacgaggtgatgcgtgcgggcatgacgagcctcaagggctaa

SEQ ID NO: 349 - protein, 533 aa, Drosophila melanogaster
MASISLLNPKAEFARAAQALAINISAAKGLQDVMRTNLGPKGTVKMLVSGAGDIKITKDGNVLLHEMQIQHPTASMIARASTAQDDSTGDGTTTTVMLIGELLKQADIYLSEGLHPRIMTDGFEKARDKALEVLDQVKVPVEINKKNLVEVANTSLKTKVHPALADLLTDVCVNAVLTIASADKTKPVDLHMVELMEMQHKSDTDTQLVRGLVMDHGARHPDMPKRLENAYILTANVSLEYEKAEVNSGFFYKTAEEREAFVRAEREFIDQRVKKVIELKRSVCDGTDKTFVLINQKGIDPISLDALAKEGILALRRAKRRNMERLSLACGGTAMNSFDDLQEEHLGYAGVVYEHVLGENKYTFVEDCKNPLSVTILIKGPNKHTITQIKDAIRDGLRAINNTIADKALVPGAGAFEVRAYNELVAFKDTIKGKSRLAVQAFADALLVIPKTLAVNSGYDAQDTIVKLTVEDRLSPELVGLDLATGEPMKPVDLGVYDNYIVKKQILNSCSIIASNLLLVDEVMRAGMTSLKG

SEQ ID NO: 350 - DNA, 3261 bp, Drosophila melanogaster
  CDS (1)..(3261): CT18257
atgtcggcgaaagcaatcaccgaggcctccggcaaggacatcctgaaccgccatctcaacacccatggcgccggcgcggccacttgccgtttttccacagtaaattccacgacagattggtccaagctcgccgttgaccatccctggctgctgaccacgccgctggtgtgcaagcccgatcaacttatcaagcgccgtggaaagctgggactaattggcgtcaagaagaactttgagcaggtgaagcagtggattggcgagcgcctcaacaaggaccagaagatcggaaatgccgtgggaaagctcaggaactttatcatcgaaccttttgtgccccacaccgatgctgaggagatgtacgtgtgcatctactcgcaccgcgccgcagacaccattctgttctaccaccagggtggcgtggatattggcgatgtggatgctaaggccgtgaagttggacgtacctgtgaactcttctctgtcgttagccgacgtgaagagcaagctgttgaaggaggtcaaggacgcgggcaccaaggagcgcattgccaagtttgtcagcgccttgtacacgacctatgtagacctgtatttcacatatctggagattaaccctctggtggtgacagccgacaatttgtacatcttggatttggcggccaagttggattcgacagctgatttcatctgccgtcccaaatggggcgagattgactatccacctccgtttggtcgagatgcatatcccgaggaggcctacatcgccgacttggacgccaagagtggagcttcgctgaagctgacgatccttaatcgtaatggtcgtatctggacgatggtggcgggcggtggcgccagtgtcatttactcggacaccatctgcgatttgggtggagcctccgagctggccaattatggcgaatacagtggggctccatcggaacagcagacgtacgagtacgcaaagacgattctcaacctgatgacctcctcgccaaagcatcccgatggcaaagtgctgattaccggagggggcattgcgaactttaccaatgtggctgcgaccttccaaggcatcatcaccgccctgcgcgaattccagccgaagctagtcgagcacaatgtatcgatctttgtgcgccgcgctggacccaactatcaggagggtcttcgaaagatgcgcgactttggcagcaccctgggcatcccactgcacgtttttggacctgagacccacatgaccgctatttgcggaatggcgctgggcaagcgacccattccccaaacggcaagcgttgagttctcgacggccaacttcctgctgcccggtggacagcaggcccaggccgatctcaaggcggccagcgatgcctctgaggcgttgggctccggttccgcagatgaggccgacagcgcgggcatttccggtgctcagcgcaacggatcgagtcttaaccgaaagttcttctccaacaccaccaaggcgattgtgtggggaatgcagcagcgggcggtgcaacgcgatgagccttctgtggtggcaatggtatatccattcaccggcgatcataagcagaagtactactggggtcacaaggaaattctgattcctgtctacaagaaaatgtcggacgccattcataagcacaaagaggtggacgttatggtcaactttgcttccatgcgcagtgcgtacgaatcgacgctagaggtgctcgaattcccccagatccggacggtggccatcatcgctgaaggtattccggaaaacatgactcgcaagcttattattgaggcggataagaagggagtggcaatcattggacccgcaaccgtgggtggcgttaagcccggttgctttaagattggcaacaccggcggtatgctggataacatcctgcactcgaaactgtaccgtccaggcagtgttgcgtatgtttcgcgctccggaggaatgtccaatgagctgaacaatattatctcaaaggccaccgacggcgtgattgagggcattgccattggaggagataggtacccaggctccacctttatggatcacattctgcggtatcaagccgatccggaaaccaagctgattgtccttttaggagaggttggtggaaccgaggagtacgacgtttgtgccgctctgaaggacggacgtattaccaagcctctggtggcctggtgcattggtacctgcgccagcatgtttacttcggaagtccagtttggccatgccggatcctgcgcgaactccgaccgagagacggctacggccaagaacaagggtctgcgagatgccggcgcctacgttcctgattcgttcgacacgctgggtgaactcatccaccacgtgtacggcgagctggttaagactggtcgagtagtgccgaaggaggaggtgccaccaccaactgtgcccatggattattcgtgggcccgcgagctgggtcttattcgcaagcccgcgtcattcatgacgtcgatctgcgacgagcgtggccaggagcttatctacgcaggaatgccgatcagcgaggtccttagcaaggacgtcggcattggcggtgtcatctcactgctatggttccagcgctgcctgccttcatacgtgtgcaagttcttcgagatgtgcctgatggttactgcggatcacggtcccgcagtttctggagctcacaacaccattgtgtgcgcccgtgctggcaaggacctggtgtcctcagtcgtcagcggtcttctgaccatcggggatcgatttggaggcgccctggacggatcggctcgacagttctctgaggcatacgacaccaacctgcacccaatggagttcgtaaacaagatgcgcaaagagggcaagcttatcctgggtattggccaccgtgtaaagtccattaataaccccgatgtgcgcgtgaagatcattaaggaattcgtactggagaacttccctgcgtgtccacttctcaaatacgccttggaggttgagaagattaccaccaacaagaaaccgaatcttatcctcaatgtggacggtgtgatagccaccgcatttgtggacatgctgcgtaacagcggctcatttaccagtgaggaagcacaggagtacattaatgtcggcgcaatcaactcgttgttcgttctgggccgcagcataggatttattggccattacatggatcagaaacgtctcaaacagggcctgtaccgtcatccgtgggacgacatctcatacgtcattcccgagcagtacaactaa

SEQ ID NO: 351 - protein, 1086 aa, Drosophila melanogaster
MSAKAITEASGKDILNRHLNTHGAGAATCRFSTVNSTTDWSKLAVDHPWLLTTPLVCKPDQLIKRRGKLGLIGVKKNFEQVKQWIGERLNKDQKIGNAVGKLRNFIIEPFVPHTDAEEMYVCIYSHRAADTILFYHQGGVDIGDVDAKAVKLDVPVNSSLSLADVKSKLLKEVKDAGTKERIAKFVSALYTTYVDLYFTYLEINPLVVTADNLYILDLAAKLDSTADFICRPKWGEIDYPPPFGRDAYPEEAYIADLDAKSGASLKLTILNRNGRIWTMVAGGGASVIYSDTICDLGGASELANYGEYSGAPSEQQTYEYAKTILNLMTSSPKHPDGKVLITGGGIANFTNVAATFQGIITALREFQPKLVEHNVSIFVRRAGPNYQEGLRKMRDFGSTLGIPLHVFGPETHMTAICGMALGKRPIPQTASVEFSTANFLLPGGQQAQADLKAASDASEALGSGSADEADSAGISGAQRNGSSLNRKFFSNTTKAIVWGMQQRAVQRDEPSVVAMVYPFTGDHKQKYYWGHKEILIPVYKKMSDAIHKHKEVDVMVNFASMRSAYESTLEVLEFPQIRTVAIIAEGIPENMTRKLIIEADKKGVAIIGPATVGGVKPGCFKIGNTGGMLDNILHSKLYRPGSVAYVSRSGGMSNELNNIISKATDGVIEGIAIGGDRYPGSTFMDHILRYQADPETKLIVLLGEVGGTEEYDVCAALKDGRITKPLVAWCIGTCASMFTSEVQFGHAGSCANSDRETATAKNKGLRDAGAYVPDSFDTLGELIHHVYGELVKTGRVVPKEEVPPPTVPMDYSWARELGLIRKPASFMTSICDERGQELIYAGMPISEVLSKDVGIGGVISLLWFQRCLPSYVCKFFEMCLMVTADHGPAVSGAHNTIVCARAGKDLVSSVVSGLLTIGDRFGGALDGSARQFSEAYDTNLHPMEFVNKMRKEGKLILGIGHRVKSINNPDVRVKIIKEFVLENFPACPLLKYALEVEKITTNKKPNLILNVDGVIATAFVDMLRNSGSFTSEEAQEYINVGAINSLFVLGRSIGFIGHYMDQKRLKQGLYRHPWDDISYVIPEQYN

SEQ ID NO: 352 - DNA, 1629 bp, Drosophila melanogaster
  CDS (1)..(1629): CT24731
atgagcgcctttcccggtacgttcgcgttcgacgaatatggtcggcctttcatcatcctgcgcgaccaggagcgccagaagcgcatcacaggaacagatgccataaagacgcacattatggccgcccgccagatcgcgtccaccctgaagacctctctgggtcccaagggtctggacaagatcatggtcagtcccgacggcgacgtgactgtgaccaacgatggcgccaccatcatgaagctgatggaggttgaccacgagattgccaagctgatggtgcagctgtcgcagtcacaggacgacgagatcggcgatggaaccaccggcgttgtcgtgctggccggagcactcttggagcaggccgagggactgatcgacaggggcattcatcccattcgcatcgccgatggctttgaattggccgcccagtgcgccatcaagcagctggacgcgatcgcccaacccttccccgtggacccgaagaacaaggagccacttatccagatcgccatgaccacgctgggcagcaagatcgtgaacaagtgccatcgtcagatggccgaaatggctgtggatgctgtgctgaatgtggccgacattgagaagaaggacgtgaacttcgagctcatcaagatcgagaccaaggtgggcggtcgcatggaggactcgatgctggtgaagggtgtcatcgttgacaagaccctcagccattcgcagatgcccaaggagctaaggaacgtcaagctggccattctcacctgcccgtttgagcccccgaagccaaagaccaagcataagctcgatgttacctccgcggaagactacagggcgctgcgcgagtacgagcaggagaagttcacccagatggtcaagcaggtgaaggacgccggcgccacccttgccatctgccagtggggcttcgatgatgaggccaaccacctgttgcttcagcaggagctgcccgccgtgcgctgggttggcggtccggagatcgagctgattgccatcgccaccggtggacgcatcgtgccgcgtttcgaagagctcacgcctgagaaactaggtgttgcgggactcgttcgcgaaatggcattcggaacatccaaggacaagatgctggtcatcgaggagtgcaaaaactccaaggctgtgaccatcttcttgcgtggaggtaacgccatgatcattgcggaggctaagcgatcgattcacgatgccatctgcgtggtgcgttcgcttgtgaaggactcgcgtattgtttacggtggtggagctgccgagattagctgctcgttggctgtggccaaggaggccgaccaactgtccacgctggagcagtacgccttccgcgccttctccgtggccctggagagcattccgctggctctggcggagaacagcggcctgcatcccatcgagacgttgtcggagctgaaggccagacaggtggccgagaagaagtccagcctgggtgtcgactgcatgctgtcgggtgattcggacatgaagagccataacgtggtggagtcgctgcactcgaagaagcagcagattctgctctccacgcagctcgtcaagatgatactcaagatcgacgacgtgcgctccaagaacgaaggcggcatgtaa

SEQ ID NO: 353 - protein, 542 aa, Drosophila melanogaster
MSAFPGTFAFDEYGRPFIILRDQERQKRITGTDAIKTHIMAARQIASTLKTSLGPKGLDKIMVSPDGDVTVTNDGATIMKLMEVDHEIAKLMVQLSQSQDDEIGDGTTGVVVLAGALLEQAEGLIDRGIHPIRIADGFELAAQCAIKQLDAIAQPFPVDPKNKEPLIQIAMTTLGSKIVNKCHRQMAEMAVDAVLNVADIEKKDVNFELIKIETKVGGRMEDSMLVKGVIVDKTLSHSQMPKELRNVKLAILTCPFEPPKPKTKHKLDVTSAEDYRALREYEQEKFTQMVKQVKDAGATLAICQWGFDDEANHLLLQQELPAVRWVGGPEIELIAIATGGRIVPRFEELTPEKLGVAGLVREMAFGTSKDKMLVIEECKNSKAVTIFLRGGNAMIIAEAKRSIHDAICVVRSLVKDSRIVYGGGAAEISCSLAVAKEADQLSTLEQYAFRAFSVALESIPLALAENSGLHPIETLSELKARQVAEKKSSLGVDCMLSGDSDMKSHNVVESLHSKKQQILLSTQLVKMILKIDDVRSKNEGGM

SEQ ID NO: 354 - DNA, 2445 bp, Drosophila melanogaster
  CDS (1)..(2445): CT24823
atgaaagtcaaagtttcgggtgaatatacgctggccgagatcgaagtcgagttggaccagcagttgacgccagacgacctgcaacccggagccacagtgctggccaccaacgagagtactggcggcttagagcggattgtcagccatgaggagctgtccagattcttcgccgtggggccagcgggcgccttaccaatgcccacggatgttgtagtggagcgaacattggcggatccggctttcaagcaaatcctgcaggaggccgacggaaagaaaggcttcgatccccaggcggagcaaatgaagattcgcgactttttggccggcgtcaccagcagcaagatgaccactgagcaatcggtctttcatggatctcgttccaattcctctgcgtccactgtcaaccgtataaagtgtccaacatgtttggtccagttcgatgccgtggcctttcaaaatcattcctgtgaagcgaagccgatcgaggtggcggtgcctcagcaggagaagccacatcttgtgcctactgtatctgctcctccggctccgctaagcaaaccggctagcgagcgggtaattcgggagaaccaagtgcgtctgcgccgttacatcaaagatgagatgaagtacgatctggccacaggcatcgaaagctcgcgcaaaaacgcggccaagggtcccaacgagtgcaccatgtgcgaccgcaaatttgtccacgcctctgggctggtgcgccacatggagaagcatgccctggacttgatcccttcgcaaaccagcgagcaaccacatacgattccggctgccggactgcatgtggtggttaagtgcaactcgtgtggccgcatcttctatgatccgcaggtggcttttagacacggccttattcacgattcggagcattcaacgatgcgtcaaagtccaatgacccaagtaccctccaatagagcagatttcaatgagctgctgctggatggcgagatgctgatagacaacgatcccgcatttgcaacgagcaatcaaaacacaaacccaccgaagaaggaaatgtttagcagcctgatcttgggaagtgttttgcagtgcgagttttgcgagtacattttcgctgacatagccgagctgcttgtccattccgcttcccatgtggcggagcggcgctttgagtgcaccgcctgcgacattcagatgaacacggccaaggaagccagcatccacttccagacggactgcattttcatgcgcgaagcaatcaggtccctaaatgtcacgcttagtcgctactttgtgtgtaatgtgtgcgagctgaagtttgccaacacggacctgctccaggagcatcggtgtacctcctttcactactttcctcgcctcaacgagaatggcaagaagctcctgctgccctgtgacttttgcgacgtcaactttgagttcgcccacgattttctggcgcacagcgaggagaagcatctcaacaaaaagaagcgcgaaaaggaaacgcgcaacacgggcgccggccgaatacgtcaatatctctgcgatatctgcggcaaatcgtacacccagtcaagccatctgtggcagcatctacgctttcaccagggtgtgaagcccttcgtttgccaggaggaaaactgtgatcggaagttcaccattcgcccagatctgaacgaccacattcgcaagtgccacacgggcgagcgtccatatctttgtctggtgtgtggaaagcgctttctcaccggatccgtcttctatcagcaccgtctgatccatcgcggcgagcggcgctatgagtgcgaggagtgtggtaaacgtttctatcgcgcggacgcgctcaagaatcaccaacgcatccacaccggagagaagccgtacagctgcctcttctgcacgaagacttttcgccagcgcggcgaccgtgacaagcacatccgagctcgacactctcacctggatgccaactcgcgtctcatgatgcagatgcagaagttccaactggagacggccgctgcgcagaaggctcaaagtcataatcccgagcagcaggataatgatgttgctggtggtgccagcacctcagatgtgccctcgggctcgggattcatgtcgactgagccaagcgtcgcggagatgcagtactctattacgccggagcagcaggaggaaatggtgtgtgtgcccattgacgaggtcaataacagtttctttatgtcgcactacatgcaagctgtccccatggaggaggatggttcggggcagcatatcattgtcttcgagcagccaggccagaatatggacatgatgtccatttacgatcagcaacaggttggggaaccaatgcatgagagcggcgtgcccaagcggccggctgaggaaaatgctagggtggtggttgtcaaaaacaatccaactaagccgatattttcggatacctatttgtaa

SEQ ID NO: 355 - protein, 814 aa, Drosophila melanogaster
MKVKVSGEYTLAEIEVELDQQLTPDDLQPGATVLATNESTGGLERIVSHEELSRFFAVGPAGALPMPTDVVVERTLADPAFKQILQEADGKKGFDPQAEQMKIRDFLAGVTSSKMTTEQSVFHGSRSNSSASTVNRIKCPTCLVQFDAVAFQNHSCEAKPIEVAVPQQEKPHLVPTVSAPPAPLSKPASERVIRENQVRLRRYIKDEMKYDLATGIESSRKNAAKGPNECTMCDRKFVHASGLVRHMEKHALDLIPSQTSEQPHTIPAAGLHVVVKCNSCGRIFYDPQVAFRHGLIHDSEHSTMRQSPMTQVPSNRADFNELLLDGEMLIDNDPAFATSNQNTNPPKKEMFSSLILGSVLQCEFCEYIFADIAELLVHSASHVAERRFECTACDIQMNTAKEASIHFQTDCIFMREAIRSLNVTLSRYFVCNVCELKFANTDLLQEHRCTSFHYFPRLNENGKKLLLPCDFCDVNFEFAHDFLAHSEEKHLNKKKREKETRNTGAGRIRQYLCDICGKSYTQSSHLWQHLRFHQGVKPFVCQEENCDRKFTIRPDLNDHIRKCHTGERPYLCLVCGKRFLTGSVFYQHRLIHRGERRYECEECGKRFYRADALKNHQRIHTGEKPYSCLFCTKTFRQRGDRDKHIRARHSHLDANSRLMMQMQKFQLETAAAQKAQSHNPEQQDNDVAGGASTSDVPSGSGFMSTEPSVAEMQYSITPEQQEEMVCVPIDEVNNSFFMSHYMQAVPMEEDGSGQHIIVFEQPGQNMDMMSIYDQQQVGEPMHESGVPKRPAEENARVVVVKNNPTKPIFSDTYL

SEQ ID NO: 356 - DNA, 1515 bp, Drosophila melanogaster
  CDS (1)..(1515): CT25072
atgcgttatgacgcctccgccgctttcgtgatgcccttcatggcacatgaccgattccaggacttttacacgcgcatggatgtgcccgagatccggcagtatatgcgcaatctcctggtggcactgcgtcatgtccacaagttcgatgtcatccatcgcgacgtgaagccgagcaactttctctacaatcgacgtcggcgagagtttctcctcgtcgatttcggtctggcccagcatgtgaatcctccggctgcgcgatcttccggaagtgccgccgccatcgccgcagccaacaacaaaaacaacaacaataataacaataataatagcaaacggccacgagagcgcgaatcaaagggggatgtgcagcaaattgcgctggatgctggtttgggtggagcagtgaagcgtatgcgtttgcacgaggagtccaacaagatgcccctgaaaccggtcaacgatattgcgccaagcgatgcgccggagcagtcagtagatgggtccaatcacgtccagccacagctagtgcagcaagagcagcaacaactgcagccgcaacagcagcagcaacaacagcagcagcaacaacagtcgcaacagcagcagcagccgcagcagcagtcgcaacagcagcacccacaacgacagccacaactggcgcagatggatcaaacagcatcgacgccatctggcagcaagtacaatacgaatcgaaatgtctcggcagcagcggctaataatgccaagtgcgtttgctttgcaaatccctcagtttgcctcaactgtctgatgaagaaggaggtgcacgcctccagggcaggaacacctggctatcggccgcccgaggttctgctcaagtacccagatcagaccactgccgtggacgtttgggcggcgggtgtgatattcctttcgatcatgtcaacggtgtatccgtttttcaaagcgcccaacgattttatcgcgctggccgagattgtaacaatatttggagatcaggcgatacggaagacggccttggctctcgaccgtatgatcaccctgagccagaggtccaggccactgaatctgcgaaagttgtgcctgcgctttcgctatcgttccgtttttagtgatgccaagctcctcaagagctacgaatctgtggacggaagctgcgaagtgtgccggaattgtgatcaatacttcttcaactgcctatgcgaggatagcgattacttgacagagccactggacgcatacgaatgttttccacccagcgcctatgacctactggatcgcctgctcgagattaatccccataaacgaattaccgccgaagaggcactaaagcatccattctttacggccgccgaggaggccgagcagacggagcaggatcagttggccaatggaacgccgcgcaagatgcgtcgacaaagatatcaaagtcacagaacggtggccgcctcacaggagcaggtcaagcagcaggttgcccttgatctgcagcaagcggccattaacaagctgtaa

SEQ ID NO: 357 - protein, 504 aa, Drosophila melanogaster
MRYDASAAFVMPFMAHDRFQDFYTRMDVPEIRQYMRNLLVALRHVHKFDVIHRDVKPSNFLYNRRRREFLLVDFGLAQHVNPPAARSSGSAAAIAAANNKNNNNNNNNNSKRPRERESKGDVQQIALDAGLGGAVKRMRLHEESNKMPLKPVNDIAPSDAPEQSVDGSNHVQPQLVQQEQQQLQPQQQQQQQQQQQQSQQQQQPQQQSQQQHPQRQPQLAQMDQTASTPSGSKYNTNRNVSAAAANNAKCVCFANPSVCLNCLMKKEVHASRAGTPGYRPPEVLLKYPDQTTAVDVWAAGVIFLSIMSTVYPFFKAPNDFIALAEIVTIFGDQAIRKTALALDRMITLSQRSRPLNLRKLCLRFRYRSVFSDAKLLKSYESVDGSCEVCRNCDQYFFNCLCEDSDYLTEPLDAYECFPPSAYDLLDRLLEINPHKRITAEEALKHPFFTAAEEAEQTEQDQLANGTPRKMRRQRYQSHRTVAASQEQVKQQVALDLQQAAINKL

SEQ ID NO: 358 - DNA, 654 bp, Drosophila melanogaster
  CDS (1)..(654): CT25274
atgcccgaactgaccgaaatcaagagcgaggctgcgccctccacctccgctgaggcgaaacccgaggacgtccgcgttgaggatgatggcagtgatagcgactccgatggtggcatgcctggtctggaggaggctgtagcggccaccacacagctgggtggaggtgccaccggtctgcccatcgacctcgtctcaaaggccaagcaatcgcgcggcgagaaaaaggccaggaagatcatgctgaagctgggacttaagcagatccagggcgtcaaccgggtgacgatcaggaagtcgaagaacatcctgttcgtgatcaacaacccagatgtgtacaagaacccccacagcgacacctacatcgtgttcggtgaggccaagatcgaggatctgtcgcaacaggcccaggtggctgccgccgagaagttcaaggccccggaggctgctggcgctgcagacagcgtgggcgccaccacatcggtggcccccattgccgaggaagacgaggaggatgtcgatgacaccggcgtggatgagaaggatatcgagctggtcatcacgcaggccaacacgacgagggccaaggcgatcaaggctctgaagaacaacaacaatgacatcgtcaacgccatcatggagcttactatgctttag

SEQ ID NO: 359 - protein, 217 aa, Drosophila melanogaster
MPELTEIKSEAAPSTSAEAKPEDVRVEDDGSDSDSDGGMPGLEEAVAATTQLGGGATGLPIDLVSKAKQSRGEKKARKIMLKLGLKQIQGVNRVTIRKSKNILFVINNPDVYKNPHSDTYIVFGEAKIEDLSQQAQVAAAEKFKAPEAAGAADSVGATTSVAPIAEEDEEDVDDTGVDEKDIELVITQANTTRAKAIKALKNNNNDIVNAIMELTML

SEQ ID NO: 360 - DNA, 1104 bp, Drosophila melanogaster
  CDS (1)..(1104): CT25472
atgaactcatccaggaaaaatataataggtcttagaagatgcggcactaataaagtgtgctgccccaagtgggaaacgtatctgccacacgatacttgtggacaatcaagaagaaaacctacgaagggcaaaataccggcgctgaatgagtttccctggatggccatgctgttatatggaaataaaaacaatttgtcccagaagctggtaccaaaatgtggtggatccctaataaacaactggtacgtcctgaccgcagcgcactgcgtggagtatccatttatggactatccgtatgccctcaaaacagtgagactgggcgaacataacacgtccacaaatcccgatcgggctattgtgaatggaagaagacagtacgctcctctttatatggaaattgaagtggaccaaattattacgcatgaacaattcaaccggggaaggcggctgataaacgacatagcactcgtgcgtcttaagtttcctgtgcgctatacgagagccatccaacctatttgccttccaagagcccaaaaattggccgcgcataagcgaaagtttcaagcatccggctggccagacatgggacaaggaattgcaagtgaggtactcttgcgcagcttcatcgcggaacggcatccagatgtgtgcaaatcaaattatgactttaatttgggcagtcagatatgtgctggtggtctggatgggaatgacaccagtcccggcgattccgggggacccttaatggagaccgtgatacgtggaaaggtcacactcacttatgcagccggcataatctcctacggacagaagccctgcgtacttaaaacttgcaagccagcattttacacaaaaacttcatacttttttgaatggataaaatcgaaattgcaaagtccatttatcgacagcgacagcaaatctctcgaacctgatacggcttttcgtagaatcgcgtgcggcgaaattggtcgagcagttcttcttttcccaagacgcgatttaacagacgacacgcctcctccacattattgttttgcaccagaacggtgcgggccagaaactgcacgtgtctcatttcggataagtagttttattttataa

SEQ ID NO: 361 - protein, 367 aa, Drosophila melanogaster
MNSSRKNIIGLRRCGTNKVCCPKWETYLPHDTCGQSRRKPTKGKIPALNEFPWMAMLLYGNKNNLSQKLVPKCGGSLINNWYVLTAAHCVEYPFMDYPYALKTVRLGEHNTSTNPDRAIVNGRRQYAPLYMEIEVDQIITHEQFNRGRRLINDIALVRLKFPVRYTRAIQPICLPRAQKLAAHKRKFQASGWPDMGQGIASEVLLRSFIAERHPDVCKSNYDFNLGSQICAGGLDGNDTSPGDSGGPLMETVIRGKVTLTYAAGIISYGQKPCVLKTCKPAFYTKTSYFFEWIKSKLQSPFIDSDSKSLEPDTAFRRIACGEIGRAVLLFPRRDLTDDTPPPHYCFAPERCGPETARVSFRISSFIL

SEQ ID NO: 362 - DNA, 687 bp, Drosophila melanogaster
  CDS (1)..(687): CT25624
atggccgaagttgctgaaaacgtggtggagaccttcgaggagccagcggcacctatggaagccgaggtggccgagacgatcctggagacaaatgtggtgtccaccactgagctgccggagatcaagctgttcggccgctggtcttgcgacgatgtcaccgttaacgacatctctctgcaggattacatctcggtgaaggagaagtttgcccgctatcttccccattccgccggacgttatgccgccaagcgtttccgcaaggcccagtgccccattgtggagcgtttgacctgctccctgatgatgaagggtcgcaacaacggcaagaagctgatggcctgccgcatcgtcaagcactcgttcgagatcattcatctgctcaccggggagaaccctctgcagatcctggtcagcgccatcatcaactcgggaccccgtgaggactccacccgtattggacgtgccggtaccgtccgtcgccaggccgtcgatgtgtcgcccctgcgtcgcgtcaaccaggctatctggctgctgtgcactggagctcgtgaggctgccttcaggaacatcaagaccatcgccgagtgcctggctgatgagctgatcaacgctgctaagggatcttccaactcgtacgccatcaagaagaaggatgagttggagcgtgtcgccaagtccaaccgttaa

SEQ ID NO: 363 - protein, 228 aa, Drosophila melanogaster
MAEVAENVVETFEEPAAPMEAEVAETILETNVVSTTELPEIKLFGRWSCDDVTVNDISLQDYISVKEKFARYLPHSAGRYAAKRFRKAQCPIVERLTCSLMMKGRNNGKKLMACRIVKHSFEIIHLLTGENPLQILVSAIINSGPREDSTRIGRAGTVRRQAVDVSPLRRVNQAIWLLCTGAREAAFRNIKTIAECLADELINAAKGSSNSYAIKKKDELERVAKSNR

SEQ ID NO: 364 - DNA, 1959 bp, Drosophila melanogaster
  CDS (1)..(1959): CT8969
atgtcggcgcaggaaaaggttatacgcgttggatcgcgaaagagcgagctcgctctgattcagaccaaacatgtcatcggccgcctgcagaagctatatcccaagcagaaattcgagatccacaccatgtcgacatttggcgatcgtgtgctgaacgtttcccttcctaagattggcgagaagagcctgttcacccgcgacctcgaggatgcgctgcgcaacggtggcgttgactttgtggtgcactccctcaaggatctgcctacagccctgccaacaggaatggccatcggagccgtgctggagcgagaagatgcgcgggacgccctcgttctgcgggagaacttcaagggccacacgatagcctcgcttccaaagggcagcgtgattggaacctcatctcttcgtcgcacagcccagattcgcaggatgtatccccatttgacggtgtgcgacatccgtggaaatctaaatactcgactggccaagctggatgcagccgattccaagttctccggcatcatactcgctcaggccggcttggtgagaatgggctggatgagtcgtattagccaggtgctggagccgaccgacttgctctatgctgttggccaaggagccctggccgtggagtgtcgggctaatgacgaccaagtgctggcaatgctgcagaaacttatgtgcctgaatacaacgtgccgcatcctagcagaacgaagcttcctgaagactttgggagggggttgctccgcccccgtggctgtttggagcaacttaaagggcgagcccttgaatggaaacagccaggaggtgggactatccctcaccggtgcagtttggagcctggatggtgcaatagagatacggaaccatctggcatgtgccttaaatgaacaaaaattggagggggaccaacggaaacgaggggcccaggaggccaccagccagttgcaggaggagaccagcagcagctgcgattctcccccggccacgaagcgtgccagaaatggcaacgacagttcgggttcggactcgaattccagcagtccgcgccagcaaggcagccctccagtgatctgtgaggatgcggctgcttgcgcagctctctccggttacactgtggatcagctctcggatctggccagtcactgcccagtgctgagtaacaacaatgctgtgggacctaccggagttagtggtggtggcgatgcggataccaacaatgtgaacaccactccccgtcagtgccctcttcgcttggtgggcggtcaggaagtgatgggccagtgcccagtgccgcacaatcaggcaatggttcctgccaaatgtccagtagcgcatgcagactctggggattccttcagcgccaagagtggaagtggaggggaatcggccaccactgctcactgtccactacagatgcccgtgggacaggacttcatgggcgaatgtccgtacgttaacaacgatgtgaaggtatcctttgcccaagctggaaagtgtccagtgactggcggtgtggcaggagcatcagcttctattttgcccacgccaccgagcagcagagccagtaatgccagcagcgctggcgatgaagtggataatgttgcaacttcctccaagtgtccctttgcggccatgcatcagggcagcggtcttgaggcgccggctaaggacaacggaaacgcagccacagccaagtgcccgttcctgcagaaaacggtccaaatgttcgactacgccgacgaggagcagccgacgccgcagcactcggtgctcattgaggatgtggaaaacctgttctgcggtctctaccagcacgcctgtcacagtcggggcatctacgagaaggccaaccagctgggcaagacgctggcggaggacctgatcaagcgcggcgccctcgacgtgatgaaggtggcccaggcagagattcacggcaaagtggcgtcgtcttaa

SEQ ID NO: 365 - protein, 652 aa, Drosophila melanogaster
MSAQEKVIRVGSRKSELALIQTKHVIGRLQKLYPKQKFEIHTMSTFGDRVLNVSLPKIGEKSLFTRDLEDALRNGGVDFVVHSLKDLPTALPTGMAIGAVLEREDARDALVLRENFKGHTIASLPKGSVIGTSSLRRTAQIRRMYPHLTVCDIRGNLNTRLAKLDAADSKFSGIILAQAGLVRMGWMSRISQVLEPTDLLYAVGQGALAVECRANDDQVLAMLQKLMCLNTTCRILAERSFLKTLGGGCSAPVAVWSNLKGEPLNGNSQEVGLSLTGAVWSLDGAIEIRNHLACALNEQKLEGDQRKRGAQEATSQLQEETSSSCDSPPATKRARNGNDSSGSDSNSSSPRQQGSPPVICEDAAACAALSGYTVDQLSDLASHCPVLSNNNAVGPTGVSGGGDADTNNVNTTPRQCPLRLVGGQEVMGQCPVPHNQAMVPAKCPVAHADSGDSFSAKSGSGGESATTAHCPLQMPVGQDFMGECPYVNNDVKVSFAQAGKCPVTGGVAGASASILPTPPSSRASNASSAGDEVDNVATSSKCPFAAMHQGSGLEAPAKDNGNAATAKCPFLQKTVQMFDYADEEQPTPQHSVLIEDVENLFCGLYQHACHSRGIYEKANQLGKTLAEDLIKRGALDVMKVAQAEIHGKVASS

SEQ ID NO: 366 - DNA, 2700 bp, Drosophila melanogaster
  CDS (1)..(2700): CT27084
atggccgacccaaagaccggtatgccggtatcccaggtgaagctggccgggaatcgccagcagcagcaacgtgctccggaatacgaggctttcaatctggtaaagaccgcgctgcagagtctggtgtggaagggaccgcccgcctggtcgccgctcatcgccaactggagtctggaactagtggccaagctgtccgataagtacacccagcggcggatgaccatcacggccagctgcaactattggctggagtgcagcgccatgcacgggctgatgacccttataaatagttgtttccgaaagttaacccaaccggaggaggaggcctgcgtggagatcatgctcaatgcctttcaccggtttcccatgaccttcgactggattgtggcgagattgggcggctgtttcccttacaagatcatcatgcagattctacagtgcggcatcaagcgattcgtcgatgactaccgctgccacctggattcggaggcgggcatcctcgattatatgacctcgtgccacgaacagcaccttagggcagcctttcgtgagatgcttagggagggattcgcaccgaagaagccgctggacgtggccgttgttcctttcctgctgatcaccaccaactactcggacacgatcctgcagagcttggtcaatgtgctagtcgaaatctataccgaggacatgtgcgaggtgatagtgcagaaggcgccgttgtggctgagcaacaaaatgtttgccggtatgcagcccacgctgaataatgccgatttcctggacaattcgatgcaggagctggaacagtgggtgctcaaccagcggaacttcccgttgctggccgatctggcctatgaggaaaccaagtacatgctgtggaagagctgcctcagcaccaatctcttcgagcagcaaacagcggtgagattactgctggtggtctcatcccagcacccgaatatttactaccaaactatatcccaacttctaaagaagtcgtatgctcaaaatcccaatggcattggcgcattaattcgcttacttggcggacaaagcggcatggttaactttccgggattcacgccaggtttcaagatggtcttggaggacatcacgttggatgttcaagttaacaatcgattgccagttccgccgggcacacccacagaagcctttaacactttctccaacctaaacatacttgccaggatgcacaagagcaagaatgtggctccgtacatcaaagcgcagcatttgaaccaagccctcaacgaatgtcttcccaaaatccttcaaatcttcgactgcaccgttaacaaactggtcctgaggatagacagggatgccgccgagcggatagcggataaattccgggcgcagcaaagtaaaaatagcaataacaacaatgaattgtgcaatggcaaggattacggaaagcgcacaaaattggagccgggagaagataaggtggatgatgaggacgctacccgcatgcgcttggcccatctcattgtggatctgttgaacaacattgaagccggcagccggacaactgtcctgcgcactccattagtcctcaagctggccacgctaagcgtaaagtacttctttgtgggcttaaccgagaagactgtgatccgtcgagcagcggcttcgcatcgctcctacacgctgttgcagaggcagtgttccgcccggaaaatcgcgagaaccgtctgcctgcgcgagctggtggagcgcgcgctcttttatcacggtcacttgcttggtcagctggaggtgtatcagctcgatgagcttgagatacccgagcacgaacacctcatcctgcagaatctgcacaccagctctggcgccaactcgaatcgctccgtgctgcattccggtattataggcagaggtctgcgaccagtgctgccccccagcgagcggaactgcgatgcggagaagcaggcgctgtatcttaaggcattgaatgcatgctgcgccgatctggagaagcccaacaacgtggagggctactcgctggtctcgctgctgctggtcgagctggtctccacggatgtcatgtacaacggcctgccctttccggatgaggagttcaccagggtcacaatggagcgggacatgctaatcaggagagcgttcatcaactccccagtgctgtgggctgttttgggactgatcgccggtcataggccggcgctttgctattcctccgtgctactgcgcgcactgtgcgccacctgcttgcatcactggcggggcaagaatgtcaatcgattccagcccactgctgcgaacgatgagctgatgctgtgcaccaagaagatgctgcaactgctggctatgagccaactaattccacctccactcaccaatctgcatctcatcatcgagcactttgaatcggcagagattgccctgctgctgcgcgagtgcatctggaactatcttaaagatcacgtgccctcgccggcgctgtttcacgtggacaacaacgggctgcactggcgcaacacgaatacacagctggccaaggtgccgccgcaatatgtggacccgttgcgccacctaatgcagcgtaagctgtccaccctgggcccccactaccatcagatgttcatcatgggcgagctgatggagggcgactcagagccagatccgacggcccggctgcagatcgttgaaatagattaa

SEQ ID NO: 367 - protein, 899 aa, Drosophila melanogaster
MADPKTGMPVSQVKLAGNRQQQQRAPEYEAFNLVKTALQSLVWKGPPAWSPLIANWSLELVAKLSDKYTQRRMTITASCNYWLECSAMHGLMTLINSCFRKLTQPEEEACVEIMLNAFHRFPMTFDWIVARLGGCFPYKIIMQILQCGIKRFVDDYRCHLDSEAGILDYMTSCHEQHLRAAFREMLREGFAPKKPLDVAVVPFLLITTNYSDTILQSLVNVLVEIYTEDMCEVIVQKAPLWLSNKMFAGMQPTLNNADFLDNSMQELEQWVLNQRNFPLLADLAYEETKYMLWKSCLSTNLFEQQTAVRLLLVVSSQHPNIYYQTISQLLKKSYAQNPNGIGALIRLLGGQSGMVNFPGFTPGFKMVLEDITLDVQVNNRLPVPPGTPTEAFNTFSNLNILARMHKSKNVAPYIKAQHLNQALNECLPKILQIFDCTVNKLVLRIDRDAAERIADKFRAQQSKNSNNNNELCNGKDYGKRTKLEPGEDKVDDEDATRMRLAHLIVDLLNNIEAGSRTTVLRTPLVLKLATLSVKYFFVGLTEKTVIRRAAASHRSYTLLQRQCSARKIARTVCLRELVERALFYHGHLLGQLEVYQLDELEIPEHEHLILQNLHTSSGANSNRSVLHSGIIGRGLRPVLPPSERNCDAEKQALYLKALNACCADLEKPNNVEGYSLVSLLLVELVSTDVMYNGLPFPDEEFTRVTMERDMLIRRAFINSPVLWAVLGLIAGHRPALCYSSVLLRALCATCLHHWRGKNVNRFQPTAANDELMLCTKKMLQLLAMSQLIPPPLTNLHLIIEHFESAEIALLLRECIWNYLKDHVPSPALFHVDNNGLHWRNTNTQLAKVPPQYVDPLRHLMQRKLSTLGPHYHQMFIMGELMEGDSEPDPTARLQIVEID

SEQ ID NO: 368 - DNA, 2397 bp, Drosophila melanogaster
  CDS (1)..(2397): CT27543
atgagtaatgctattaaccaaaatggcacaggtctagagcagcaagttgctggtctggacttgaatggcggctctgctgactacagcggccccataaccagcaagacttccactaactcggtcaccggtggtgtgtatgtgcccccgcaccttcgtggtggtggtggcaataacaacgcagcggacgcagagagccagggccaaggacagggccagggtcagggcttcgactccagatccgggaatccgcgccaggagactagggaccctcaacagtcgcgcggaggcggaggcgaataccgcagaggcggcggcggtggtggtcgcggcttcaatcgccagagcggcgactacggttacggaagcggcggcggaggacgacgtggaggcggtggacgtttcgaggacaactacaacggtggtgaattcgattcgcgtcgcggcggtgactggaatcgcagcggcggaggcggcggaggaggtcgaggatttggacgcggaccatcgtaccgcggcggtggcggcggaagcggtagcaacctcaacgagcagactgccgaggatggccaggcacagcagcagcagcagccgcgcaacgatcgttggcaggagccagaacgtcctgccggattcgatggcagcgagggcggacagtctgccggcggcaacagaagctacaacaatcgcggcgagcgcggaggcggcggttacaacagccgctggaaggagggcggcggctcaaacgtcgactacacaaagctgggcgcccgagatgagcgcctggaggtggagctgttcggcgtgggcaatacgggaatcaattttgacaaatacgaggatatacccgtggaggcgacgggccagaatgtgcccccgaacatcacatcgttcgatgatgtgcagctgacggagattatccgcaacaacgtggccttagcacgttatgacaaaccgacaccggtgcagaagcacgccattccgatcattatcaatggccgggatctaatggcctgcgcccagactggatccggcaagacggccgccttcctggtgccgattctcaaccagatgtacgagctgggacatgtgcccccgccgcaaagcacccggcagtacagccggcgcaagcagtatccgttgggtctggtgctggcgccgacccgcgaactggccacccagatctttgaggaggccaagaagttcgcctatcgctcccggatgcgcccggcagtgctgtacggcggaaacaatactagcgagcagatgcgcgagctggaccgcggttgccatctgattgtggccacacccggtcgcctagaggacatgatcacacgcggaaaggtgggactggagaacattcgattccttgtactggatgaggctgatcgtatgttggacatgggtttcgagccgcagatccgtcgcatcgtcgaacagctaaacatgccgccaaccggacagcgccagacgcttatgttctcggccacattccccaagcagatccaggagttagccagcgatttcctcagcaactacattttcttggccgttggtcgtgtgggctccacatctgagaacattacgcagacaatcctgtgggtctatgaacccgacaagcgctcgtatctgctggatctgctctcgtctatccgcgatggccccgaatacaccaaagacagcctaacactgatctttgtggagactaagaagggtgcagactcgctggaggagttcctgtaccagtgcaatcatcccgtcactagcatccacggtgatcgcacgcagaaggagcgcgaggaggcactgcgctgcttccgatcgggcgactgccccatcctggtggccacagccgtggccgctcgtggcctggacattccgcacgttaagcacgttattaactttgacctgccctcggatgtggaggagtatgtccaccgtatcgggcgtaccggacgtatgggtaatcttggtgtggccacctcctttttcaacgaaaagaaccgcaacatttgctccgatctcttggagctgctgatcgaaacgaagcaggagatccccagtttcatggaggatatgagttcggatcgcggacatggcggagccaagcgggctggacgaggcggtggtggacgttatggtggcggcttcggctccagggattaccgtcaaagctctggcggcggcggtggcggacgcagtggaccgccaccacgtagcggtggttccggatcaggaggcggcggcggcagttaccgcagcaatggaaactcgtacggcggcaattcgggcggcggtggatactatggcggcggcgccggtggtggctcctatggcggctcctacggcggcggcagtgcctcgcactcttcgaacgcacccgactggtgggctcaataa

SEQ ID NO: 369 - protein, 798 aa, Drosophila melanogaster
MSNAINQNGTGLEQQVAGLDLNGGSADYSGPITSKTSTNSVTGGVYVPPHLRGGGGNNNAADAESQGQGQGQGQGFDSRSGNPRQETRDPQQSRGGGGEYRRGGGGGGRGFNRQSGDYGYGSGGGGRRGGGGRFEDNYNGGEFDSRRGGDWNRSGGGGGGGRGFGRGPSYRGGGGGSGSNLNEQTAEDGQAQQQQQPRNDRWQEPERPAGFDGSEGGQSAGGNRSYNNRGERGGGGYNSRWKEGGGSNVDYTKLGARDERLEVELFGVGNTGINFDKYEDIPVEATGQNVPPNITSFDDVQLTEIIRNNVALARYDKPTPVQKHAIPIIINGRDLMACAQTGSGKTAAFLVPILNQMYELGHVPPPQSTRQYSRRKQYPLGLVLAPTRELATQIFEEAKKFAYRSRMRPAVLYGGNNTSEQMRELDRGCHLIVATPGRLEDMITRGKVGLENIRFLVLDEADRMLDMGFEPQIRRIVEQLNMPPTGQRQTLMFSATFPKQIQELASDFLSNYIFLAVGRVGSTSENITQTILWVYEPDKRSYLLDLLSSIRDGPEYTKDSLTLIFVETKKGADSLEEFLYQCNHPVTSIHGDRTQKEREEALRCFRSGDCPILVATAVAARGLDIPHVKHVINFDLPSDVEEYVHRIGRTGRMGNLGVATSFFNEKNRNICSDLLELLIETKQEIPSFMEDMSSDRGHGGAKRAGRGGGGRYGGGFGSRDYRQSSGGGGGGRSGPPPRSGGSGSGGGGGSYRSNGNSYGGNSGGGGYYGGGAGGGSYGGSYGGGSASHSSNAPDWWAQ

SEQ ID NO: 370 - DNA, 819 bp, Drosophila melanogaster
  CDS (1)..(819): CT27750
atgacaaccgcatcggccaccaagtccatacgattaaaaaagggagcagcatcagcgacctccgcatccaactcatccaccccctcgcccacatccgcacccgtctcccccacatccgtatccgcatccgcaccagcaacgcccttggtaactgcacattccaacagtattgccagcagtacaaataacgcccaattcctgagctcctcgcccacgagtctcggttttggcctgggtctatccgctcttgccacgcccccgaaccagaggcaacggcaactgcagtcccagtcgaccggatccaagaacaagtatcagcagtcgcagcagcagcgccagtcgccgcagcagcagcagggatcctctgtaggcggtggaggcttcttctttgccaacaacaaccgaaggaacggaggaggacgttcgccccagggagctatgcaggttcggcagtcaccagccaccattttgggtggaggtttctcgccgggaatcgtcggaggatcggctcgcaagcagaggaagagcccttcgttgggcggaaagatatcgccccagcaccagatgcagcagcacccactcatacccaccgcactgacgcatttcgcgggcagcaagtgctttgatgcaccagctccaacggcgctgcccaagccaccgcagcactggacgttgtccaggtcggagggtaagcttcccatgatgatgccgtcgatgcccaagttccaggtgccgatgcagacaggccgctcgaagcggaatctcctcgatgacttcgacacgcacaacctaaagttgctgctcaatgtgcagtcgtaa

SEQ ID NO: 371 - protein, 272 aa, Drosophila melanogaster
MTTASATKSIRLKKGAASATSASNSSTPSPTSAPVSPTSVSASAPATPLVTAHSNSIASSTNNAQFLSSSPTSLGFGLGLSALATPPNQRQRQLQSQSTGSKNKYQQSQQQRQSPQQQQGSSVGGGGFFFANNNRRNGGGRSPQGAMQVRQSPATILGGGFSPGIVGGSARKQRKSPSLGGKISPQHQMQQHPLIPTALTHFAGSKCFDAPAPTALPKPPQHWTLSRSEGKLPMMMPSMPKFQVPMQTGRSKRNLLDDFDTHNLKLLLNVQS

SEQ ID NO: 372 - DNA, 1188 bp, Drosophila melanogaster
  CDS (1)..(1188): CT27796
atggacagatcgaagggtcgaaatgttatcgtctgtgataacggcactgggttcgttaagtgcggatatgccggcagcaatttccccacccacatttttccctcgatggtgggacgacccatgattcgggcggtcaacaaaatcggcgatatcgaagtcaaggatctgatggtcggcgatgaggcctcacagctgcgatccctgctggaggtctcctatccgatggagaacggtgtggtgcgcaactgggacgacatgtgccacgtgtgggagtacacgttcggtcccaaaaagatggacatcgatccgacgaacacaaaaatcctgctaaccgagccgcccatgaatcccacaaagaatcgcgagaagatgattgaggtgatgttcgagaaatatggcttcgattcggcgtacattgccatccaggccgcttggacgctatatgcccagggtctgatctctggcgtggtgatcgattcgggtgatggtgtaacgcatatatgtcccgtctacgaggagtttgccctgccccatctgacgcgacgattggacattgccggtcgggatatcactcgctatttgattaagttactgttactacgtggctacgctttcaatcattccgccgacttcgaaacggttcgcataatgaaggagaagctctgctacattggctacgacatcgagatggagcagcgtttggccctggagacgacggtgctggtggaatcgtacacgctacccgacggtcgtgttatcaaggtcggcggcgagagatttgaggcgccagaggctctgttccagccgcatttgatcaacgtcgagggaccgggcattgcggaactggccttcaacaccatccaggcggcagacatcgacatacggcccgaactctacaagcacatagttctgtccggcggctccaccatgtatccgggtcttcccagtcggctggagcgtgagatcaaacagctgtacctggagcgggtactcaagaacgatacggaaaagctggcgaaattcaaaatacgcattgaggatccaccgcgacgcaaggatatggtctttatcggcggagctgttctggcggaggtgacaaaggatcgcgacggcttctggatgtccaagcaggagtatcaggaacagggtctcaaagtattgcaaaagctgcaaaagatcagtcactag

SEQ ID NO: 373 - protein, 395 aa, Drosophila melanogaster
MDRSKGRNVIVCDNGTGFVKCGYAGSNFPTHIFPSMVGRPMIRAVNKIGDIEVKDLMVGDEASQLRSLLEVSYPMENGVVRNWDDMCHVWEYTFGPKKMDIDPTNTKILLTEPPMNPTKNREKMIEVMFEKYGFDSAYIAIQAAWTLYAQGLISGVVIDSGDGVTHICPVYEEFALPHLTRRLDIAGRDITRYLIKLLLLRGYAFNHSADFETVRIMKEKLCYIGYDIEMEQRLALETTVLVESYTLPDGRVIKVGGERFEAPEALFQPHLINVEGPGIAELAFNTIQAADIDIRPELYKHIVLSGGSTMYPGLPSRLEREIKQLYLERVLKNDTEKLAKFKIRIEDPPRRKDMVFIGGAVLAEVTKDRDGFWMSKQEYQEQGLKVLQKLQKISH

SEQ ID NO: 374 - DNA, 2472 bp, Drosophila melanogaster
  CDS (1)..(2472): CT27906
atggcgctgcccagaaaactgatatccaagatctacgatataaaggcacatgatagcagggtcacgagccttgatcttggcgaaactggacgagtgctggtcaccggaggagaggatcgcaatgtgaacctctgggcgattggtcaaaatgagtgctttatgtctctgacgggccacaatcgttccatcgattgcgtgcgttttgcttataaggataactttgtctactccgccgacgacatcggtataatccgaagatgggatctgaattcacagaaaatctactccacgctaaatggccacatgaagagtggtcgcactctggactttaacccgtctggagaatatgtggtgtccgggagcaatgataccaccgtcaggctttgggacgtgcagaacgaaaacaactgcattaaggtatgtcgcggccacatgtcccacgtgaattccgtaaaattctcgccggatggtctttggattgcctctgctggcctggagggttccatactcatctgggacatacggaagagcaaacagataatggagttcatagccgatccgccggttacggctatcacatgcgtgcaattccatccgtttgagttcctgctggccgccggtcgcgtcgatggcaccgtgtccatttacgatctggaacaccagcagctcgtctcgcagaccacgcacttctatggccaggccatcaggtgtataacctttagtgacaatggcgagtgcctttttgttggcagttcttcgggcatttcggtaattggatgggaaccggatcgtgagctggaccatataaaaagcacctggtccttcttggcggatatgaaagtggtcaacaataagttgatctgtggttgtcatgagatcgacaccgtttcaatcaacaccatcagtctggatcgagtgataccgttctatcagccgccaaactcactacccaactttaagcacaactcgacgaaccgaaagagctttacacgtggcaaccagaagttcaggctgtcagttggcggtgccaagccggcacaggtgcaggaggagcacgagggcgacaagagtggattgtcctcgcccaattatagtctggaggttgtgaacgagcggttgctggaagtcgccggaagactttcttccaaatggtcctccggttgccacctgtccacttggcttccgaatggccggattcgtcggcggaacttggcgccgcatcatgtcgtatatggcggagcaatcgattctgcccttaggcagggtaagtactccagagtgcctgataatatggccagctatggcagtagttacggggccatcgatacccgcctgatgtccttaaacgaacccagttcactgcacaagccggacatttacaatctatatccgctggacaagaacgaggaggcggatgtgcagcagttggagttcaatctgaacgatagcaatccgccaatactcaacaactatgataactacgaaatggccgaggactttccggtcaatcagaacctgaactacattaccaataactataagccagtgccgcaacctccacgatcaacgcctcgtccaagtcgatcaagaagaccactaccaccacccttgcacaagaggacaacgaacaacatggccggcgcgaagcagacgtccacgggcatctttggtggcagcaagctaagccaggtctcctcggtcagctccatggaactgcacaagctggacgacaacatggtactgaaaaagtcctcctcctcgaatgtcgtcaacaagaacaagcggccaatgggctcggcccagagtcagttcagcaaggagaacaatcaacagaaaaatatcaatgtggagatcatcacaaagccaccgatgcgatcccgcaccaccctggatatgcgtacgtcgcaccaggctaaaactcaggaaaagcaaattcaccagcagcagccaatgaacaatcgcattataatggatgatcacgacttcgatatgctctcgagatcacacgaggctgtgctgcaggagctgagcaatcgtcagtctagcctggatttgctgcgacacgcaacaaggtctcacgatgtgctgggcgcattaaggcaggcaaggagctgtggcaaatccattttcatagatctactcggagccatactggagaaaccgtcctcgtggaacttggacttctgcatgtttgtgctgccagagatttacgaactcttgcaaagccaacacaagttccactttacgagagcctgtgataccctgcgtattatattgtcgaacttcttgccaactatacaggagaacctcgattcctgggccgccaatggcctgggcgtcgatgtgacacgcgaggatcgacagaggaagtgcgccgagtgccagcggtggttgttgcaaatcaagaacctgcccgagagcacacactttgggtccacgctgtcacaattacaaaacataattattttctaa

SEQ ID NO: 375 - protein, 823 aa, Drosophila melanogaster
MALPRKLISKIYDIKAHDSRVTSLDLGETGRVLVTGGEDRNVNLWAIGQNECFMSLTGHNRSIDCVRFAYKDNFVYSADDIGIIRRWDLNSQKIYSTLNGHMKSGRTLDFNPSGEYVVSGSNDTTVRLWDVQNENNCIKVCRGHMSHVNSVKFSPDGLWIASAGLEGSILIWDIRKSKQIMEFIADPPVTAITCVQFHPFEFLLAAGRVDGTVSIYDLEHQQLVSQTTHFYGQAIRCITFSDNGECLFVGSSSGISVIGWEPDRELDHIKSTWSFLADMKVVNNKLICGCHEIDTVSINTISLDRVIPFYQPPNSLPNFKHNSTNRKSFTRGNQKFRLSVGGAKPAQVQEEHEGDKSGLSSPNYSLEVVNERLLEVAGRLSSKWSSGCHLSTWLPNGRIRRRNLAPHHVVYGGAIDSALRQGKYSRVPDNMASYGSSYGAIDTRLMSLNEPSSLHKPDIYNLYPLDKNEEADVQQLEFNLNDSNPPILNNYDNYEMAEDFPVNQNLNYITNNYKPVPQPPRSTPRPSRSRRPLPPPLHKRTTNNMAGAKQTSTGIFGGSKLSQVSSVSSMELHKLDDNMVLKKSSSSNVVNKNKRPMGSAQSQFSKENNQQKNINVEIITKPPMRSRTTLDMRTSHQAKTQEKQIHQQQPMNNRIIMDDHDFDMLSRSHEAVLQELSNRQSSLDLLRHATRSHDVLGALRQARSCGKSIFIDLLGAILEKPSSWNLDFCMFVLPEIYELLQSQHKFHFTRACDTLRIILSNFLPTIQENLDSWAANGLGVDVTREDRQRKCAECQRWLLQIKNLPESTHFGSTLSQLQNIIIF

SEQ ID NO: 376 - DNA, 1134 bp, Drosophila melanogaster
  CDS (1)..(1134): CT27940
atggcggtcagccgtgtaccatcgccgcccttgccggaagttaatacgccagttgccgagaactggtgctacacgcagcattcgcaggtcaaagtggttaaatttagttatatgtggaccataaataactttagtttttgtcgggaagaaatgggtgaggtactcaaatcgtccacattctcagccggtgctaatgacaaactaaaatggtgtttacgggttaaccccaagggtctcgacgaggagagcaaggattacctttctttatatttactgttagtttcgtgtaataaatcagaagtcagagccaagttcaaattttccatactgaatgcgaagcgtgaggaaaccaaagcaatggaatcccaaagagcttatcgttttgtgcagggcaaagattggggcttcaagaagttcatccgacgagacttcctgctggacgaggccaacggcctgctgccggaggataagctgaccatcttctgcgaggtcagcgtcgtggcggacagcgtgaacatctccggacaatccaatatcgtgcagttcaaagtgcccgaatgcaagctgtccgaggatcttggcaatctatttgacaacgagaagttcagcgacgtcacgctctccgtgggcggtcgagagttccaggcgcacaaggccatattggcagcgcgcagcgatgtctttgcggccatgttcgagcatgagatggaggagcgaaagttgaatcgtgtcgccataaccgatgtggatcatgaggttcttaaagaaatgctgcgattcatatacacgggcaaggcgcccaatctagaaaaaatggctgatgatctcctagcggctgctgataagtatgcactcgaaaagctgaaagtgatgtgcgaggaggcgctgtgcgtcaatctctctgtagaaacagcagccgaaaccctaatattagctgatctccacagtgcggatcaattgaaagcacaaacgatagatttcataaatactcatgccaccgatgtgatggaaacctccggctggcaaaatatgatcacaacacattcacatttgatagcggaggcatttcgtgcgctcgcaacacaacaaatcccaccaattggaccaccaaggaaacgcgtgaaaatgagctaa

SEQ ID NO: 377 - protein, 377 aa, Drosophila melanogaster
MAVSRVPSPPLPEVNTPVAENWCYTQHSQVKVVKFSYMWTINNFSFCREEMGEVLKSSTFSAGANDKLKWCLRVNPKGLDEESKDYLSLYLLLVSCNKSEVRAKFKFSILNAKREETKAMESQRAYRFVQGKDWGFKKFIRRDFLLDEANGLLPEDKLTIFCEVSVVADSVNISGQSNIVQFKVPECKLSEDLGNLFDNEKFSDVTLSVGGREFQAHKAILAARSDVFAAMFEHEMEERKLNRVAITDVDHEVLKEMLRFIYTGKAPNLEKMADDLLAAADKYALEKLKVMCEEALCVNLSVETAAETLILADLHSADQLKAQTIDFINTHATDVMETSGWQNMITTHSHLIAEAFRALATQQIPPIGPPRKRVKMS

SEQ ID NO: 378 - DNA, 1026 bp, Drosophila melanogaster
  CDS (1)..(1026): CT27993
atggccctgacgtcgcgcttctacaacgagcggtatccggagatcgaggatgtcgttatggtgaacgtgctgtccatcgccgagatgggcgcctacgttcatctgcttgagtacaacaacatcgagggcatgatcctgctgtcggagctgtcccgccggcgcatccgctccatcaacaagctgattcgtgtcggcaagaccgaaccggtggtggttatccgtgttgacaaggagaagggctacatcgatctgtcgaagcgtcgcgtttcgcccgaagatgtcgagaagtgcaccgagcgcttcgctaaggccaaggccatcaactcactgctccgccatgtcgccgacatactcggcttcgagggcaacgagaagctggaagatctctaccagaagaccgcctggcacttcgagaagaagtacaacaacaagacggtcgcctacgacatcttcaagcaatcggtcaccgatcccaccgtcttcgatgagtgcaacctggaaccggagaccaaggaggtcctgttgagcaacatcaagcggaagctggtctcgcccactgtcaagatccgtgcggacatcgagtgctcctgctacggttacgagggcatcgacgctgtcaaggcatcgctcaccaagggcctggagctgagcaccgaggagctgcccattcgcatcaacctgatagcaccgccactctatgtaatgaccacatccactaccaagaagacagacggtttaaaggctctggaggtggccattgagcacattcgcgccaagaccagcgagtacgatggagagttcaaggtgatcatggcacccaaactggttacggccatcgacgaggcggatctggccagacgcctggagcgcgctgaggccgagaacgcccaggtggctggcgacgatgacgaggaggatggcgccgaccaggagggcatgcagttcgatccagagaaggagttcaaccacaagggatcgggggcgggtcgtgcgaacgaggaggatgaggaggaggaagaggattag

SEQ ID NO: 379 - protein, 341 aa, Drosophila melanogaster
MALTSRFYNERYPEIEDVVMVNVLSIAEMGAYVHLLEYNNIEGMILLSELSRRRIRSINKLIRVGKTEPVVVIRVDKEKGYIDLSKRRVSPEDVEKCTERFAKAKAINSLLRHVADILGFEGNEKLEDLYQKTAWHFEKKYNNKTVAYDIFKQSVTDPTVFDECNLEPETKEVLLSNIKRKLVSPTVKIRADIECSCYGYEGIDAVKASLTKGLELSTEELPIRINLIAPPLYVMTTSTTKKTDGLKALEVAIEHIRAKTSEYDGEFKVIMAPKLVTAIDEADLARRLERAEAENAQVAGDDDEEDGADQEGMQFDPEKEFNHKGSGAGRANEEDEEEEED

SEQ ID NO: 380 - DNA, 2499 bp, Drosophila melanogaster; identical to SEQ ID NO: 306
  CDS (1)..(2499): CT20536

SEQ ID NO: 381 - protein, 832 aa, Drosophila melanogaster; identical to SEQ ID NO: 307

What is claimed is:

1. A method for identifying a compound that inhibits the activity of a protein essential for Drosophila viability, comprising:
(a) expressing in a recombinant host a DNA molecule comprising
(i) a nucleotide sequence selected from the group consisting of the even numbered SEQ ID NOs:14-380, or
(ii) a nucleotide sequence encoding an amino acid sequence selected from the group consisting of the odd numbered SEQ ID NOs:15-381,
to produce a protein essential for Drosophila viability;
(b) testing compounds suspected of having the ability to inhibit the activity of the protein expressed in (a); and
(c) identifying a compound tested in (b) that inhibits the activity of the protein.

2. A method for killing or inhibiting the growth or viability of an insect, comprising applying to the insect a compound identified according to the method of claim 1.

3. A method for identifying a compound that interacts with a protein essential for Drosophila viability, comprising:
(a) expressing in a recombinant host a DNA molecule comprising
(i) a nucleotide sequence selected from the group consisting of the even numbered SEQ ID NOs:14-380, or
(ii) a nucleotide sequence encoding an amino acid sequence selected from the group consisting of the odd numbered SEQ ID NOs:15-381,
to produce a protein essential for Drosophila viability;
(b) testing compounds suspected of having the ability to interact with the protein expressed in (a); and
(c) identifying a compound tested in (b) that interacts with the protein.

4. A method for killing or inhibiting the growth or viability of an insect, comprising applying to the insect a compound identified according to the method of claim 3.

5. A method for killing or inhibiting the growth or viability of an insect, comprising inhibiting expression in said insect of a protein having at least 60% sequence identity to an amino acid sequence selected from the group consisting of the odd numbered SEQ ID NOs:15-381.

6. The method of claim 5, wherein expression of said protein is inhibited by disruption in said insect of a nucleotide sequence having at least 60% sequence identity to a nucleotide sequence selected from the group consisting of the even numbered SEQ ID NOs:14-380.

7. The method of claim 6, wherein said nucleotide sequence is disrupted by RNA interference.
